(19) United States
(12) Patent Application Publication
(10) Pub. No.: US 2011/0097743 A1
(43) Pub. Date: Apr. 28, 2011

(54) COMPOSITIONS AND METHODS OF DETECTING TIABS

(75) Inventors: Bernard Bihain, Nancy (FR); Virginie Ogier, Nancy (FR); Marie Brulliard, Nancy (FR)

(73) Assignee: TRANSMEDI SA, Vandoeuvre Les Nancy (FR)

(21) Appl. No.: 12/747,945

(22) PCT Filed: Dec. 15, 2008
(86) PCT No.: PCT/IB2008/003836

§ 371 Date: Dec. 10, 2010

(30) Foreign Application Priority Data
Dec. 14, 2007 (EP) 07301680.0

(51) Int. Cl. G01N 33/574; G01N 33/53; C12N 5/10

(52) U.S. Cl. 435/7.23; 436/501; 435/7.24; 435/325

(57) ABSTRACT

The present invention relates to novel methods and products for assessing the physiological status of a subject. More particularly, the invention relates to methods of assessing the presence, risk or stage of a cancer in a subject by measuring the levels of antibodies against particular aberrant protein domains in a sample from the subject, or the presence or number of immune cells bearing TCR specific for such aberrant protein domains. The invention is also suitable to assess the responsiveness of a subject to a treatment, as well as to screen candidate drugs and design novel therapies. The invention may be used in any mammalian subject, particularly in human subjects.

[0001] The present invention relates to novel methods and products for assessing the physiological status of a subject. More particularly, the invention relates to methods of assessing the presence, risk or stage of a cancer in a subject by measuring the levels of antibodies against particular aberrant protein domains in a sample from the subject, or the presence or number of immune cells bearing TCR specific for such aberrant protein domains. The invention is also suitable to assess the responsiveness of a subject to a treatment, as well as to screen candidate drugs and design novel therapies. The invention may be used in any mammalian subject, particularly in human subjects.

### INTRODUCTION

[0002] Cancer is progressively becoming the leading cause of death in Western countries and strong therapeutic benefits, i.e., event-free long-term survival of >90% of patients are obtained mostly in individuals diagnosed at early stage¹. Cancer is a genetic disease with accumulation of mutations in oncogenes and tumor suppressor genes². Genetic testing is useful for identifying individuals at risk for colon, lung, breast, ovary and neuro-endocrine cancers^{3,4}. However, clinical management of patients with genetic risks is complex because of the lack of precision as to when a given individual will develop cancer⁵.

[0003] Gene expression varies widely in cancer cells and analysis of differences in transcription patterns have led to definition of molecular signatures associated with good or bad prognosis⁶. Such signatures may guide and optimize therapeutic strategies, but again the prerequisite is prior identification of the tumor.

[0004] Massive efforts towards identification of reliable, early stage, cancer molecular markers detectable in accessible human body fluids are pursued through 3 main directions. First, changes in protein concentrations and/or isoforms between normal and cancer patients are analyzed using various separation and identification procedures^{7,8}.

[0005] Some of these methods are suitable for systematic screening, but the technology is currently confronted with huge differences in concentrations of abundant plasma proteins (>>>mg/ml) compared to that of protein released by low-level tissue leakage (<<pg/ml). An alternative approach consists of identification through expression profiling of a few specific targets differentially expressed in cancers and development of sensitive assays to monitor their concentrations in plasma⁹. Both strategies have been successfully implemented, but none has yet provided markers sufficiently robust to be useful in systematic clinical screening^{10,11}. The second axis of investigation is based on identification and characterization of circulating DNA in plasma. An early report suggested that the simple presence of circulating DNA in serum was diagnostic¹²; however, this is now questionable because healthy individual circulating free DNA concentrations are in the same range as that of cancer patients^{13,14}. Maintenance of normal DNA methylation pattern is critical for proper cell function and its loss is among the earliest molecular alteration during carcinogenesis^{15,16}. Several groups have reported detection of tumor-associated methylation patterns in serum, but the success rate varied greatly among different teams that used the same biomarkers and technology¹⁷⁻²⁰.

[0006] This is due both to the diversity of tumor DNA methylation patterns and to low abundance of tumor DNA that represents at most 0.12% of somatically normal haploid genome^{21,22}. Thus, detection of cancer somatic mutations in minute amounts of circulating cancer DNA is also too close to background levels to provide robust assays, even when considering recent improvements in sequencing technology^{23,24}. The third axis consists of probing the immune system response to cancer by systematic search of auto-antibodies^{25,26}. The presence of these antibodies has been established, but the process by which self molecules become immunogenic is not yet understood²⁷. Screening of expression libraries constructed from cancer cell mRNA led to identification of a large number of low sensitivity antibodies that, when used in combination of >20, achieved up to 82% sensitivity in prostate cancer patients^{28,29}. An alternative method relies on identification of auto-antibody signature by immunoblotting of 2 D gel electrophoresis³⁰. This yields subsequent identification primarily of proteins identified by auto-antibodies independently of cancer status and of a limited number of proteins reacting preferentially with cancer sera³⁰.

[0007] Our strategy is based on a different rationale that directly stems from the results obtained through large scale cancer DNA sequencing programs^{31,32}. This important work led to the conclusion that cancer somatic mutations occur at rates, higher than expected, but nevertheless remain rare events: the estimated rate is 3.1 per 10⁶ base leading on average to 90 amino-acid substitutions in a given tumor³¹. Virtually all biochemical, biological and clinical attributes are heterogeneous within cancer of the same histological subtype³³. We have thus sought for alternate mechanisms contributing to cancer cell heterogeneity. We recently showed that cancer cell mRNA sequences contain more base substitutions than that of normal cells³⁴. Cancer mRNA base substitution occurs at sites that are 10⁴ more commonly encountered than those bearing somatic mutations and do not correspond to single nucleotide polymorphisms (SNP). Thus the differences in mRNA heterogeneity isolated from normal and cancer cells from the same patient can not be explained by differences occurring at the genomic level. Base substitution in cancer mRNA is determined by the composition of DNA context that corresponds to the portion melted by active RNA Polymerase II (Pol. II)^{34,35}. The substituted base is most frequently identical to that immediately preceding or following the event. In vitro data demonstrated forward slipping of Pol II in specific DNA contexts^{36,37}, and we have therefore proposed that transcription infidelity (TI) explains that a fraction of cancer mRNA are not faithful copies of genomic DNA.

[0008] We have expanded this analysis to whole genome and all available human transcripts and confirm that mRNA base substitution is significantly increased (2.5-fold) in cancer. Most importantly, we discovered that single base omission in cancer mRNA is much more dramatically (38-fold) increased. Gaps in mRNA cause the loss of downstream genomic information and can lead to aberrant proteins that might trigger immunological response. We have sought and found, in cancer patients, specific IgG directed against predicted aberrant peptides (PAP) translated from cancer mRNA containing a single base gap. Detection of low abundance diversified IgG provides a novel method for diagnosis of most common forms of human solid tumors. A panel of IgG effectively discriminated patients with non small cell lung cancer (NSCLC) from subjects without cancer.

[0009] The present invention thus shows such gaps (and insertions) are dramatically increased in cancer patients and create aberrant but predictable immunogenic proteins which represent very efficient biomarkers.

### SUMMARY OF THE INVENTION

[0010] An object of this invention relates to a method for detecting the presence, risk or stage of development of a cancer in a subject, the method comprising contacting in vitro a sample from the subject with a polypeptide comprising the sequence of an aberrant protein domain created by transcription infidelity, wherein the formation of a complex between said polypeptide and an antibody (TIAB) or TCR-bearing cell present in said sample is an indication of the presence, risk or stage of development of a cancer.

[0011] A further object of this invention relates to a method of assessing the physiological status of a subject, the method comprising a step of measuring the presence or level of antibodies specific for aberrant protein domains created by transcription infidelity (TIAB) or of TCR-bearing immune cells that bind to such domains in a sample from the subject, wherein a modified level of said TIAB or immune cells in said sample as compared to a reference value is an indication of a physiological disorder.

[0012] A further object of the invention is a method of determining the efficacy of a treatment of a cancer, the method comprising (i) determining the level of at least one polypeptide comprising the sequence of an aberrant protein domain created by transcription infidelity or the level of TIAB or corresponding TCR-bearing cells, in a sample from the subject and (ii) comparing said level to the level in a sample from said subject taken prior to or at an earlier stage of the treatment.

[0013] An other object of the invention is a method of monitoring the progression or the extension of a cancer in a subject, said method comprising (i) contacting a sample obtained from said subject with at least one polypeptide comprising the sequence of an aberrant protein domain created by transcription infidelity, (ii) determining the level of TIAB or corresponding TCR-bearing cells in said sample and (iii) comparing said level to reference level. The reference value may be a mean or median value determined from individuals not having a cancer or disease, a reference level obtained from a control patient, a reference level obtained from the subject before cancer onset or with a control polypeptide.

[0014] An other object of the invention relates to a method of determining whether an individual is making a polypeptide comprising a sequence selected from the group consisting of SEQ ID NOs: 1-3334, comprising contacting a sample obtained from said individual with an agent indicative of the presence of said polypeptide and determining whether said agent binds to said sample.

[0015] A further object of this invention is a method of selecting, characterizing, screening or optimizing a biologically active compound, said method comprising placing in vitro a test compound in contact with a gene and determining the ability of said test compound to modulate the production, from said gene, of RNA molecules containing transcription infidelity gaps and insertions.

[0016] A further object of this invention resides in a method of producing a peptide specific for transcription infidelity, the method comprising:

a) identifying a protein domain resulting from a transcription infidelity gap or insertion;
b) synthesizing a peptide comprising the sequence of said protein domain of a); and
c) optionally verifying, in a biological sample from a mammalian subject, that the peptide binds an antibody.

[0017] The invention also relates to any polypeptide comprising the sequence of an aberrant protein domain created by gap or insertion transcription infidelity, or an epitope-containing fragment thereof, especially a polypeptide comprising a sequence selected from SEQ ID NOs: 1 to 3334, or an epitope-containing fragment thereof.

[0018] A further object of the invention is an isolated nucleic acid encoding a polypeptide described above or comprising a first nucleotide sequence encoding a polypeptide selected from the group consisting of SEQ ID NOs: 1-3334 or a sequence complementary thereto and a second nucleotide sequence of 100 or less nucleotides in length, wherein said second nucleotide sequence is adjacent to said first nucleotide sequence in a naturally occurring nucleic acid.

[0019] An other object of this invention is a cloning or expression vector comprising a polynucleotide described above and the host cell transformed or transfected with this vector

[0020] A further object of this invention is an isolated antibody or portion of an antibody which specifically binds to any polypeptide comprising the sequence of an aberrant protein domain created by gap or insertion transcription infidelity and, particularly, to a polypeptide comprising a sequence selected from the group consisting of SEQ ID NOs: 1-3334 or an epitope-containing fragment thereof.

[0021] A further object of this invention is an immune cell comprising a TCR specific for any polypeptide comprising the sequence of an aberrant protein domain created by gap or insertion transcription infidelity and, particularly, for a polypeptide comprising a sequence selected from the group consisting of SEQ ID NOs: 1-3334.

[0022] The invention also relates to a solid support comprising at least one polypeptide comprising the sequence of an aberrant protein domain created by gap or insertion transcription infidelity, and, particularly, at least one polypeptide comprising a sequence selected from the group consisting of SEQ ID NOs: 1-3334 or an epitope-containing fragment thereof.

[0023] The invention further relates to a device or product comprising, immobilized on a support, at least one polypeptide comprising the sequence of an aberrant protein domain created by gap or insertion transcription infidelity, and, particularly, at least one polypeptide comprising a sequence selected from the group consisting of SEQ ID NOs: 1-3334 or an epitope-containing fragment thereof.

[0024] An other object of this invention is a kit comprising at least a device or product as defined above and a reagent to perform an immune reaction.

[0025] The invention further relates to a method of modulating an immune response in a subject, the method comprising treating the subject to deplete immune cells expressing a TCR specific for a polypeptide as defined above. Such immune cells typically include B cells, dendritic cells or T cells. Depletion may be accomplished by methods known in the art, such as ex vivo depletion using specific ligands.

### LEGEND TO THE FIGURES

[0026] FIG. 1 Representation of K gaps located within ORF.

[0027] Shows for all statistically significant K gaps within ORF the % of deviation measured in the cancer set Y axis and normal set X axis. Red diamonds indicate the 45 K gaps selected for biological evaluation (table 5). Insert shows the number of transcripts affected by the indicated number of statistically significant K gaps located within the ORF.

[0028] FIG. 2. Aberrant mRNA detection of a deletion predicted on Cofilin gene in a lung cancer patient c-DNA library.

[0029] FIG. 2a. Bioinformatics prediction and characteristics of selected gap.

[0030] FIG. 2b. Cloning strategy.

[0031] FIG. 2c. qPCR on normal and variant.

[0032] FIG. 2d. cDNA variant sequence.

[0033] FIG. 2e. Genomic DNA sequence.

[0034] FIG. 3. Detection of IgG recognizing 15 PAP (peptides 1-15 from table 5) in plasma of control and cancer patients bearing the indicated forms of solid tumors.

[0035] FIG. 3a. Fluorescence intensity signal recorded for each individual sample incubated with biotinylated PAP were subtracted from that recorded in blank streptavidin coated wells. Intensities of this differences are shown in light blue [symbol] if it corresponds to the lower half of values recorded in controls. Dark blue [symbol] corresponds to signals in the highest half of control values. Above controls, but lower half of positive signal are in light red [symbol] . Dark red [symbol] is for patients in highest half of positive signals. Blank cells show tests that could not be performed due to sample shortage. Controls are 26 healthy individuals, patients with indicated various forms of cancer are ranked from top (early) to bottom (advanced) for each cancer according to staging. Significant p-values of Wilcoxon tests are shown at the bottom of the figure.

[0036] FIG. 3b. Detection of IgG directed 13 predicted aberrant peptides in plasma of controls and cancer patients bearing the indicated forms of solid tumor.

[0037] Fluorescence intensity signal recorded for each individual sample incubated with biotinylated PAP were subtracted from the mean value recorded with PAP 14 and 15 or solely PAP 15 when the information was not available for PAP 14. The raw data are the same as that of FIG. 3A. Intensities of calculated signal is shown in light blue if it correspond to the lower half of value recorded in controls. Dark blue corresponds to signal in the highest half of control. Above control but lower half of positive signal are in light red. Upper half positive signals are in dark red.

[0038] FIG. 4. Detection of IgG directed against PAP in sera of NSCLC versus controls without cancer.

[0039] FIG. 4A. IgG directed against 37 PAP are measured (37 first peptides from table 5). N terminally biotinylated peptide with AA sequence corresponding to 37 PAP were produced and used as baits in streptavidin wells to bind putative immunoglobulins. Samples were tested at 1/100 dilution, after washing IgG bound to PAP were revealed by secondary anti-human IgG Fc domain. Control patients include 25 healthy individuals and 12 patients with COPD (light and dark blue panels) and 49 NSCLC (Study II, Table 4) (red panel). P-values of Wilcoxon tests of cases versus all controls are shown.

[0040] FIG. 4B. Statistical analysis between 37 controls and 49 lung cancers. Non parametric Wilcoxon test p-values are given for each TIAB.

[0041] FIG. 5. Lack of detection of IgG directed against canonical peptides (CP)

[0042] Fluorescence intensity is measured for IgG directed against peptides corresponding to canonical reading of the genome, i.e., peptides corresponding to translation of mRNA corresponding to RefSeq without gap. Canonical peptide sequences are given in table 6.

[0043] FIG. 5A. IgG directed against PAP 1 and canonical peptide chosen on the same gene (I₆₄ to Q₉₃) are measured. IgG directed against a canonical peptide from albumin (between Q₁₂₈ and P₁₄₃) are also measured. All patients from FIG. 4 are included.

[0044] FIG. 5B. Schematic representation of canonical and predicted aberrant peptide sequences.

[0045] FIG. 5C. IgG directed against PAP 7, 24 and 28 and their canonical peptides are shown for 11 controls (blue panel) and 16 NSCLC (red panel).

[0046] FIG. 6. Detection of IgG directed against PAP in sera of Mus musculus.

[0047] FIG. 6A. Bioinformatics analysis of homology between Homo sapiens and Mus musculus sequences. mRNA and PAP alignments are given for PAP 7, 48 and 62 and show that these sequences are conserved. Protein sequence of negative control CP 7 is also conserved between human and mouse. PAP 2 and 9 are discriminant between controls and NSCLC in human but are not conserved in mouse.

[0048] FIG. 6B. 12 normal mice (C57B1/6) were injected in sub-cutaneous with 5*10⁵ LLC1 cells. The day of injection and 1-2-3 weeks after, TIAB directed against PAP 48, 62, 7 and corresponding CP titers were measured. TIAB directed against PAP 2 and 9 titers were measured in 4 mice the day of injection and 3 weeks after. Mean+−SEM are shown.

[0049] FIG. 7. Combination of IgG titers directed against PAP in sera of lung cancers versus controls without cancer.

[0050] FIG. 7A. Control patients include 161 healthy individuals (blue panel) and 140 lung cancers (Study III, Table 4) including adenocarcinomas ADK (red panel), squamous (orange panel) and others (yellow panel). Support Vector Machine allows discrimination of controls versus lung cancers with 6 PAP (7, 29, 48, 66, 68, 70). Distance to hyperplane is shown; patients showing negative values by SVM model are classified as non cancerous. Patients showing positive values are classified as cancerous.

[0051] FIG. 7B shows percentage of lung cancer patients classified as positive according to their age.

[0052] FIG. 7C shows percentage of lung cancer patients classified as positive according to the histopathology of their disease.

[0053] FIG. 7D shows difference of distances to SVM hyperplane between lung cancer patients that are disease free 3 years after surgery and patients that are deceased or alive with recurrent cancer.

[0054] FIG. 8. Combination of IgG titers directed against PAP in sera of lung cancers versus breast cancers. Control patients include 20 healthy individuals (blue panel), 20 lung cancers (red panel) and 20 breast cancers (purple panel) (Study IV, Table 4).

[0055] FIG. 8A shows a combination of PAP that discriminates lung cancers versus controls without cancer.

[0056] FIG. 8B shows several combinations of PAP that discriminate lung cancers versus breast cancers.

[0057] FIG. 8C shows a combination of PAP that discriminates breast cancers versus controls without cancer.

### DETAILED DESCRIPTION OF THE INVENTION

[0058] The present invention relates to novel methods and products for assessing the physiological status of a subject by measuring TIAB levels. More particularly, the invention relates to methods of assessing the presence, risk or stage of a cancer in a subject by measuring TIAB levels in a sample from the subject. The invention is also suitable to assess the responsiveness of a subject to a treatment, to monitor the progression or the extension of a cancer as well as to screen candidate drugs.

[0059] Transcription Infidelity designates a novel mechanism by which several distinct RNA molecules are produced in a cell from a single transcript sequence. This newly identified mechanism potentially affects any gene, is non-random, and follows particular rules, as disclosed in co-pending application no PCT/EP07/057,541, herein incorporated by reference.

[0060] The present application shows that transcription infidelity can introduce gaps or insertions in RNA molecules, thereby creating a diversity of detectable aberrant protein sequences from a single gene (TI polypeptide sequences). These TI polypeptide sequences are particularly interesting since they are long enough to contain epitopes against which antibodies may be generated by mammalians. As a result, the expression of such aberrant proteins in a subject can be assessed by measuring the presence of corresponding antibodies or TCR-bearing cells in a sample from the subject.

[0061] The present invention now provides a method for predicting and/or identifying the sequence of such aberrant protein domains generated by gap or insertion transcription infidelity events from any gene, as well as methods of producing polypeptides comprising such TI sequences. The invention also discloses more than 2000 gap TI (gTI) polypeptides and more than 1000 insertions TI (iTI) polypeptides, and demonstrates, in human samples, the striking correlation between the presence of antibodies directed against these polypeptide sequences and the presence of a cancer in the subject. More specifically, increased levels of specific IgG directed against predicted aberrant peptide (PAP) are detected in sera of most (>75%) patients with common forms of solid tumours in excess of normal subjects. All 7 of the common forms of solid tumours (colon, lung, breast, ovarian, uterus, head and neck and melanoma) cause the production of IgG directed against aberrant proteins. Increase specific IgG levels were observed in most subjects with early stage disease, i.e., negative lymph node and no metastasis.

[0062] Measuring such antibodies directed against TI polypeptides, termed TIABs (Transcriptional Infidelity AntiBody), or corresponding immune cells bearing a TCR receptor specific for such aberrant domains, therefore represents a novel approach for detecting and monitoring disorders, as well as for drug development.

[0063] TIAB

[0064] Within the context of the present invention, the term TIAB (“Transcription Infidelity AntiBody”) designates an antibody that specifically binds an epitope contained in a protein sequence generated by TI, particularly by gTI or iTI. TIABs more specifically designate antibodies naturally produced by a mammalian against an epitope contained in a protein sequence generated by TI, particularly by gTI and iTI (gap and insertion Transcription Infidelity). TIABs may be of any type, including IgG, IgM, IgA, IgE, IgD, etc. An antibody is “specific” for a particular epitope or sequence when the binding of the antibody to said epitope or sequence can be reliably discriminated from non-specific binding (i.e., from binding to another antigen, particularly to the native protein not containing said domain).

[0065] In one aspect, TIAB or portion of TIAB may be attached to a solid support. The attachment maintains the TIAB in a suitable conformation to allow binding of a specific gTI or iTI polypeptide when contacted with a sample containing the same. The attachment may be covalent or non-covalent, directly to the support or through a spacer group. Various techniques have been reported in the art to immobilize an antibody on a support (polymers, ceramic, plastic, glass, silica, etc.). The support may be magnetic, such as magnetic beads, to facilitate e.g., separation.

[0066] Immune cells bearing a TCR specific for such TI polypeptides include any cells of the immune system which contain a TCR, such as e.g., T cells, such as CTL, CD4+ lymphocytes, CD8+ lymphocytes and/or Treg cells, as well as antigen-presenting cells: B cells, dendritic cells or macrophages. The term includes, in particular, any TIAB-producing immune cells. Such cells may be cultured in conventional conditions, and expanded in vitro or ex vivo using TI polypeptides of this invention as a (co-)stimulatory factor.

[0067] TI Polypeptides and their Production

[0068] As will be disclosed below, the invention now discloses the sequence of various TI polypeptides and allows the prediction of TI sequences from virtually any gene.

[0069] In a first embodiment, the present invention is drawn to an isolated polypeptide comprising a gTI sequence, i.e., a sequence of an aberrant protein domain created by gap transcription infidelity. Specific examples of polypeptides of this invention comprise a sequence selected from SEQ ID NOs: 1 to 2206 (see Table 3a), or an epitope containing fragment thereof.

[0070] In a second embodiment, the present invention is drawn to an isolated polypeptide comprising an insertion TI sequence, i.e., a sequence of an aberrant protein domain created by insertion transcription infidelity. Specific examples of polypeptides of this invention comprise a sequence selected from SEQ ID NOs: 2207-3334 (see Table 3b), or an epitope containing fragment thereof.

[0071] The term “epitope-containing fragment” denotes any fragment containing at least 6 consecutive amino acid residues, preferably at least 8, even more preferably at least 10, most preferably at least 12, which form an immunologic epitope for antibodies or TCR-expressing cells. Such an epitope may be linear or conformational, and specific for B- or T-cells.

[0072] A TI polypeptide of this invention typically comprises between 8 and 100 amino acids, preferably between 8 and 50, more preferably between 10 and 40 amino acids. The polypeptides of this invention may be produced by any conventional technique, such as artificial polypeptide synthesis or recombinant technology.

[0073] Polypeptides of this invention may optionally comprise additional residues or functions, such as, without limitation, additional amino acid residues, chemical or biological groups, including labels, tags, stabilizer, targeting moieties, purification tags, secretory peptides, functionalizing reactive groups, etc. Such additional residues or functions may be chemically derivatized, added as an amino acid sequence region of a fusion protein, complexed with or otherwise either covalently or non-covalently attached. They may also contain natural or non-natural amino acids. The polypeptide may be in soluble form, or attached to (or complexed with or embedded in) a support, such as a matrix, a column, a bead, a plate, a membrane, a slide, a cell, a lipid, a well, etc.

[0074] In a particular embodiment, polypeptides are biotinylated to form complexes with streptavidin.

[0075] The polypeptides of this invention may be present as monomers, or as multimers. Also, they may be in linear conformation, or in particular spatial conformation. In this respect, the polypeptides may be included in particular scaffold to display specific configuration.

[0076] Polypeptides of the present invention may be used as immunogens in vaccine compositions or to produce specific antibodies. They may also by used to target drugs or other molecules (e.g., labels) to specific sites within an organism. They may also be used as specific reagents to detect or dose specific antibodies or TCR-bearing immune cells from any sample.

[0077] In this respect, a particular object of this invention resides in a device or product comprising a polypeptide as defined above attached to a solid support. The attachment is preferably a terminal attachment, thereby maintaining the polypeptide in a suitable conformation to allow binding of a specific antibody when contacted with a sample containing the same. The attachment may be covalent or non-covalent, directly to the support or through a spacer group. Various techniques have been reported in the art to immobilize a peptide on a support (polymers, ceramic, plastic, glass, silica, etc.), as disclosed for instance in Hall et al., Mechanisms of ageing and development 128 (2007) 161. The support may be magnetic, such as magnetic beads, to facilitate e.g., separation.

[0078] The device preferably comprises a plurality of polypeptides of this invention, e.g., arrayed in a pre-defined order, so that several TIABs may be detected or measured with the same device.

[0079] The device is typically made of any solid or semi-solid support, such as a titration plate, dish, slide, wells, membrane, bead, column, etc. The support typically comprises at least two polypeptides selected from SEQ ID NO: 1 to 3334, or an epitope-containing fragment thereof, more preferably from the 45 PAP polypeptides of table 5 (included in SEQ ID NO 1-3334).

[0080] In a most preferred embodiment, the method or support of the invention uses a combination of at least 2, preferably at least 3 polypeptides comprising the sequence of a distinct PAP polypeptide of Table 5.

[0081] In a particular embodiment, the device or method uses at least one, two or three polypeptides selected from PAP 1, 2, 4, 6, 7, 24, 25, 28, 29, 44, or 48 (Table 5).

[0082] In another particular embodiment, the method or support of the invention uses a combination of distinct PAP polypeptides of Table 5 selected from:
[0083] polypeptides PAP7, PAP66, PAP70, PAP29, PAP68 and PAP48;
[0084] polypeptides PAP7, PAP48, PAP70 and PAP29;
[0085] polypeptides PAP6, PAP29, PAP70 and PAP82;
[0086] polypeptides PAP6, PAP7, PAP29, PAP48, PAP70 and PAP82;
[0087] polypeptides PAP6, PAP29, PAP70 and PAP69;
[0088] polypeptides PAP7, PAP48, PAP70, PAP74 and PAP29; or
[0089] polypeptides PAP7, PAP29 and PAP94.

[0090] In a particular embodiment, the device comprises from 2 to 10 polypeptides.

[0091] The support may comprise additional objects or biological elements, such as control polypeptides and/or polypeptides having a different immune reactivity.

[0092] Formation of an immune complex between the polypeptide and a TIAB may be assessed by known techniques, such as by using a second labelled antibody specific for human antibodies, or by competition reactions, etc.

[0093] A further aspect of this invention resides in a kit comprising a device as disclosed above, as well as one or several reagents to perform an immune reaction, i.e. formation and detection of an immune complex.

[0094] TI Polynucleotides

[0095] A further embodiment of this invention relates to a polynucleotide comprising a nucleotide sequence encoding a polypeptide as defined above or a complementary strand thereof. Particularly, this polynucleotide comprising a first nucleotide sequence encoding a polypeptide selected from the group consisting of SEQ ID NOs: 1-3334 or a sequence complementary thereto and a second nucleotide sequence of 100 or less nucleotides in length, wherein said second nucleotide sequence is adjacent to said first nucleotide sequence in a naturally occurring nucleic acid. The length of the second nucleotide sequence which is adjacent to the first nucleotide sequence may be, for example, 75, 50, 25, 10 or 0.

[0096] The polynucleotides of the present invention may be DNA or RNA, such as complementary DNA, synthetic DNA, mRNA, or analogs of these containing, for example, modified nucleotides such as 3′alkoxyribonucleotides, methylphosphanates, and the like, and peptide nucleic acids (PNAs), etc. The polynucleotide may be labelled. The polynucleotide may be produced according to techniques well-known per se in the art, such as by chemical synthetic methods, in vitro transcription, or through recombinant DNA methodologies, using sequence information contained in the present application. In particular, the polynucleotide may be produced by chemical oligonucleotide synthesis, library screening, amplification, ligation, recombinant techniques, and combination(s) thereof.

[0097] A specific embodiment of this invention resides in a polynucleotide encoding a polypeptide comprising a sequence selected from SEQ ID 2207-3334 or an epitope-containing fragment thereof.

[0098] Polynucleotides of this invention may comprise additional nucleotide sequences, such as regulatory regions, i.e., promoters, enhancers, silencers, terminators, and the like that can be used to cause or regulate expression of a polypeptide.

[0099] Polynucleotides of this invention may be used to produce a recombinant polypeptide of this invention. They may also be used to design specific reagents such as primers, probes or antisense molecules (including antisense RNA, iRNA, aptamers, ribozymes, etc.), that specifically detect, bind or affect expression of a polynucleotide encoding a polypeptide as defined above. They may also be used as therapeutic molecules (e.g., as part of an engineered virus, such as, without limitation, an engineered adenovirus or adeno-associated virus vector in gene therapy programs) or to generate recombinant cells or genetically modified non-human animals, which are useful, for instance, in screening compound libraries for agents that modulate the activity of a polypeptide as defined above.

[0100] Within the context of this invention, a nucleic acid “probe” refers to a nucleic acid or oligonucleotide having a polynucleotide sequence which is capable of selective hybridization with a transcription infidelity domain or a complement thereof, and which is suitable for detecting the presence (or amount thereof) in a sample containing said domain or complement. Probes are preferably perfectly complementary to a transcription infidelity domain however, certain mismatch may be tolerated. Probes typically comprise single-stranded nucleic acids of between 8 to 1500 nucleotides in length, for instance between 10 and 1000, more preferably between 10 and 800, typically between 20 and 700. It should be understood that longer probes may be used as well. A preferred probe of this invention is a single stranded nucleic acid molecule of between 8 to 400 nucleotides in length, which can specifically hybridize to a transcription infidelity domain.

[0101] The term “primer” designates a nucleic acid or oligonucleotide having a polynucleotide sequence which is capable of selective hybridization with a transcription infidelity domain or a complement thereof, or with a region of a nucleic acid that flanks a transcription infidelity domain, and which is suitable for amplifying all or a portion of said transcription infidelity domain in a sample containing said domain or complement. Typical primers of this invention are single-stranded nucleic acid molecules of about 5 to 60 nucleotides in length, more preferably of about 8 to about 50 nucleotides in length, further preferably of about 10 to 40, 35, 30 or 25 nucleotides in length. Perfect complementarity is preferred, to ensure high specificity. However, certain mismatch may be tolerated, as discussed above for probes.

[0102] Another aspect of this invention resides in a vector, such as an expression or cloning vector comprising a polynucleotide as defined above. Such vectors may be selected from plasmids, recombinant viruses, phages, episomes, artificial chromosomes, and the like. Many such vectors are commercially available and may be produced according to recombinant techniques well known in the art, such as the methods set forth in manuals such as Sambrook et al., Molecular Cloning (2d ed. Cold Spring Harbor Press 1989), which is hereby incorporated by reference herein in its entirety.

[0103] A further aspect of this invention resides in a host cell transformed or transfected with a polynucleotide or a vector as defined above. The host cell may be any cell that can be genetically modified and, preferably, cultivated. The cell can be eukaryotic or prokaryotic, such as a mammalian cell, an insect cell, a plant cell, a yeast, a fungus, a bacterial cell, etc. Typical examples include mammalian primary or established cells (3T3, CHO, Vero, Hela, etc.), as well as yeast cells (e.g., Saccharomyces species, Kluyveromyces, etc.) and bacteria (e.g., E. coli). It should be understood that the invention is not limited with respect to any particular cell type, and can be applied to all kinds of cells, following common general knowledge.

### Diagnosis

[0104] The present invention allows the performance of detection or diagnostic assays that can be used, e.g., to detect the presence, absence, predisposition, risk or severity of a disease from a sample derived from a subject. In a particular embodiment, the disease is a cancer. The term “diagnostics” shall be construed as including methods of pharmacogenomics, prognostic, and so forth.

[0105] In a particular aspect, the invention relates to a method of detecting in vitro or ex vivo the presence, absence, predisposition, risk or severity of a disease in a subject, preferably a human subject, comprising placing a sample from the subject in contact with a polypeptide as defined above and determining the formation of an immune complex. Most preferably, the polypeptide is immobilized on a support. In a preferred embodiment, the method comprises contacting the sample with a device as disclosed above and determining the formation of immune complexes. Preferably, the polypeptide is selected from SEQ ID NO: 1-3334 or an epitope-containing fragment thereof, and most preferably from the 45 PAP of table 5 (included in SEQ ID NO 1-3334).

[0106] In an other aspect, the invention relates to a method of detecting in vitro or ex vivo the presence, absence, predisposition, risk or severity of a disease in a subject, preferably a human subject, comprising placing a sample from the subject in contact with a TIAB or a portion of a TIAB or a corresponding TCR-bearing cell as defined above and determining the formation of an immune complex. Most preferably, the TIAB or the corresponding TCR-bearing cell is immobilized on a support. In a preferred embodiment, the method comprises contacting the sample with a device as disclosed above and determining the formation of immune complexes. In an other preferred embodiment, the TIAB or the corresponding TCR-bearing cell are specific for a polypeptide selected from SEQ ID NOs: 1-3334 or an epitope-containing fragment thereof, and preferably from the 45 PAP of table 5.

[0107] A particular object of this invention resides in a method of detecting the presence, absence, predisposition, risk or severity of cancers in a subject, the method comprising placing in vitro or ex vivo a sample from the subject in contact with a polypeptide as defined above and determining the formation of an immune complex. More preferably, the polypeptide is immobilized on a support and selected from SEQ ID NOs: 1-3334 or an epitope-containing fragment thereof, and most preferably from the 45 PAP of table 5.

[0108] Another object of the invention relates to a method of detecting in vitro or ex vivo the presence, absence, predisposition, risk or severity of a disease in a biological sample, preferably, a human biological sample, comprising placing said sample in contact with a polypeptide as defined above and determining the presence of immune cells expressing a TCR specific for such a polypeptide. Preferably, the polypeptide is selected from SEQ ID NOs: 1-3334 or an epitope-containing fragment thereof, and most preferably from the 45 PAP of table 5.

[0109] A further aspect of this invention resides in a method of assessing in vitro or ex vivo the level of transcription infidelity in a subject, preferably, a human subject, comprising placing a sample from the subject in contact with a polypeptide as defined above and determining the formation of an immune complex. Most preferably, the polypeptide is immobilized on a support. In a preferred embodiment, the method comprises contacting the sample with a device as disclosed above and determining the formation of immune complexes.

[0110] A further aspect of this invention resides in a method of assessing in vitro or ex vivo the level of transcription infidelity in a subject, preferably, a human subject, comprising placing a sample from the subject in contact with a polypeptide as defined above and determining the presence of immune cells expressing a TCR specific for such a polypeptide.

[0111] Another embodiment of this invention is directed to a method of determining the efficacy of a treatment of a cancer, the method comprising (i) determining the level of at least one polypeptide comprising the sequence of an aberrant protein domain created by transcription infidelity or the level of TIAB or corresponding TCR-bearing cells, in a sample from the subject and (ii) comparing said level to the level in a sample from said subject taken prior to or at an earlier stage of the treatment. Preferably, polypeptide(s) is(are) selected from SEQ ID NOs: 1-3334 or an epitope-containing fragment thereof, and more preferably from the 45 PAP of table 5.

[0112] A further aspect of this invention is directed to a method of determining whether an individual is making a polypeptide comprising the sequence of an aberrant protein domain created by transcription infidelity, and particularly comprising a sequence selected from the group consisting of SEQ ID NOs: 1-3334 or an epitope-containing fragment thereof, said method comprising contacting a sample obtained from said individual with an agent indicative of the presence of said polypeptide and determining whether said agent binds to said sample.

[0113] In a first embodiment, the sample obtained from the subject is placed in contact with a polypeptide which binds to antibodies specific for a polypeptide comprising the sequence of an aberrant protein domain created by transcription infidelity, and particularly, comprising a sequence selected from the group consisting of SEQ ID NOs: 1-3334 or an epitope-containing fragment thereof.

[0114] In another embodiment, the sample obtained from the subject is placed in contact with a polypeptide which binds immune cell comprising a TCR specific for a polypeptide comprising the sequence of an aberrant protein domain created by transcription infidelity, and particularly, comprising a sequence selected from the group consisting of SEQ ID NOs: 1-3334 or an epitope-containing fragment thereof.

[0115] In another embodiment, the sample obtained from the subject is placed in contact with an antibody or portion thereof which is specific for a polypeptide comprising the sequence of an aberrant protein domain created by transcription infidelity, and particularly, comprising a sequence selected from the group consisting of SEQ ID NOs: 1-3334 or an epitope-containing fragment thereof.

[0116] In another embodiment, the sample obtained from the subject is placed in contact with immune cells comprising TCR specific for a polypeptide comprising the sequence of an aberrant protein domain created by transcription infidelity, and particularly, comprising a sequence selected from the group consisting of SEQ ID NOs: 1-3334 or an epitope-containing fragment thereof.

[0117] This invention further relates to a method of monitoring the progression or the extension of a cancer in a subject, said method comprising (i) contacting a sample obtained from said subject with at least one polypeptide comprising the sequence of an aberrant protein domain created by transcription infidelity, (ii) determining the level of TIAB or corresponding TCR-bearing cells in said sample and (iii) comparing said level to reference level, said reference level being a mean or median value from subjects not having a cancer or control value from the subject before cancer onset. Preferably the polypeptide comprises the sequence of PAP 12, for which titers of antibodies are significantly increased in non operable patients versus operable ones and thus provide indication related to disease extension.

[0118] The presence (or increase) in TIAB or corresponding TCR-bearing immune cells in a sample is indicative of the presence, predisposition or stage of progression of a cancer disease. Therefore, the invention allows the design of appropriate therapeutic intervention, which is more effective and customized. Also, this determination at the pre-symptomatic level allows a preventive regimen to be applied.

[0119] The diagnostic methods of the present invention can be performed in vitro, ex vivo or in vivo, preferably in vitro or ex vivo. The sample may be any biological sample derived from a subject, which contains antibodies or immune cells, as appropriate. Examples of such samples include body fluids, tissues, cell samples, organs, biopsies, etc. Most preferred samples are blood, plasma, serum, saliva, seminal fluid, and the like. The sample may be treated prior to performing the method, in order to render or improve availability of antibodies for testing. Treatments may include, for instance one or more of the following: cell lysis (e.g., mechanical, physical, chemical, etc.), centrifugation, extraction, column chromatography, and the like.

[0120] In a preferred embodiment, the test is performed on serum or plasma.

[0121] Furthermore, in a most preferred embodiment, the sample is treated as disclosed in EP08 305 293.6 prior to testing. Indeed, the applicant has shown that optimal testing conditions are different when the samples have been kept fresh frozen at −20° C. or at −80° C. More preferably, the sample to be tested is subjected to a chemical or physical treatment suitable to unveil antibody binding site, change the conformation of the binding site, or unmask the antibody binding site. More preferably, the treatment comprises heating the sample at a temperature of at least 36° C. for a period of time sufficient to activate the antibody. Preferred temperatures are comprised between 36° C. and 70° C., preferably between 36° C. and 60° C.

[0122] Determination of the presence, absence, or relative abundance of a TIAB or specific immune cell in a sample can be performed by a variety of techniques known per se in the art. Such techniques include, without limitation, methods for detecting an immune complex such as, without limitation, ELISA, radio-immunoassays (RIA), fluoro-immunoassays, microarray, microchip, dot-blot, western blot, EIA, IEMA, IRMA or IFMA (see also Immunoassays, a practical approach, Edited by JP Gosling, Oxford University Press). In a particular embodiment, the method comprises contacting the sample and polypeptide(s) under conditions allowing formation of an immune complex and revealing said formation using a second labelled reagent.

[0123] In a typical embodiment, the method comprises comparing the measured level of TIAB or immune cells to a reference level, wherein a difference is indicative of a dysfunction in the subject, e.g., a cancer. A change is typically a 10%, 20%, 30%, 40%, 50% or more variation as compared to the reference value. More particularly, the change in the level as compared to the reference value is an increase, which is indicative of the presence of a cancer.

[0124] The reference value may be a mean or median value determined from individuals not having a cancer or disease, a reference level obtained from a control patient, a reference level obtained from the subject before cancer onset or with a control polypeptide.

[0125] In a preferred embodiment, a change (e.g., an increase) in the level of TIAB or immune cells in said sample as compared to the reference level is indicative of the presence, risk or stage of development of a cancer.

[0126] Contacting may be performed in any suitable device, such as a plate, microtitration dish, test tube, wells, glass, column, and so forth. In specific embodiments, the contacting is performed on a substrate coated with the polypeptide. The substrate may be a solid or semi-solid substrate such as any suitable support comprising glass, plastic, nylon, paper, metal, polymers and the like. The substrate may be of various forms and sizes, such as a slide, a membrane, a bead, a column, a gel, etc. The contacting may be made under any condition suitable for a detectable antibody-antigen complex to be formed between the polypeptide and antibodies of the sample.

[0127] In a specific embodiment, the method comprises contacting a sample from the subject with (a support coated with) a plurality of polypeptides as described above, and determining the presence of immune complexes.

[0128] In a particular embodiment, the method comprises contacting the sample with a plurality of sets of beads, each set of beads being coated with a distinct polypeptide as defined above.

[0129] In an other particular embodiment, the method comprises contacting the sample with a slide or membrane on which several polypeptides as defined above are arrayed.

[0130] In an other particular embodiment, the method comprises contacting the sample with a multi-wells titration plate, wherein at least part of the wells are coated with distinct polypeptides as defined above.

[0131] The invention may be used for determining the presence, risk or stage of any cancer in a subject. This includes solid tumors, such as, without limitation, colon, lung, breast, ovarian, uterus, liver, or head and neck cancers, as well as melanoma, brain tumors, etc. The invention may also be used for liquid tumors, such as leukemia. The invention may be used in a first screening, to detect a cancer, even at early stages thereof, in a subject having a risk of developing such a disease. In a second screen, the invention may be used to more precisely identify the type of cancer, depending on the polypeptides used for detection. In this respect, as disclosed in FIG. 3, polypeptides comprising the sequence of PAP 1, 2, 3, 4 or 7 (Table 5), or an epitope-containing fragment thereof, allow the identification of patients with various types of cancers.

[0132] In a particular embodiment, the invention is used to determine the presence, risk or stage of a lung cancer and the polypeptide comprises a sequence selected from PAP 1, 2, 4, 6, 7, 24, 25, 28, 29, 44 and 48 (Table 5) (FIG. 4) or an epitope-containing fragment thereof.

### Drug Screening

[0133] The invention also allows the design (or screening) of novel drugs by assessing the ability of a candidate molecule to modulate TIAB levels or corresponding immune cells.

[0134] A particular object of this invention resides in a method of selecting, characterizing, screening or optimizing a biologically active compound, said method comprising determining whether a test compound modulates TIAB levels. Modulation of TIAB levels can be assessed with respect to a particular protein, or with respect to a pre-defined set of proteins, or globally.

[0135] A further embodiment of the present invention resides in a method of selecting, characterizing, screening or optimizing a biologically active compound, said method comprising placing in vitro a test compound in contact with a gene and determining the ability of said test compound to modulate the production, from said gene, of RNA molecules containing transcription infidelity gaps and insertions.

[0136] A further embodiment of the present invention resides in a method of selecting, characterizing, screening or optimizing a biologically active compound, said method comprising placing in vitro a test compound in contact with an immune cell expressing a TCR receptor specific for a polypeptide as defined above, and determining the ability of said test compound to modulate the activity or growth of said cell.

[0137] The above screening assays may be performed in any suitable device, such as plates, tubes, dishes, flasks, etc. Typically, the assay is performed in multi-well microtiter dishes. Using the present invention, several test compounds can be assayed in parallel. Furthermore, the test compound may be of various origin, nature and composition. It may be any organic or inorganic substance, such as a lipid, peptide, polypeptide, nucleic acid, small molecule, in isolated or in mixture with other substances. The compounds may be all or part of a combinatorial library of compounds, for instance.

[0138] Further aspects and advantages of the present invention will be disclosed in the following experimental section, which should be considered as illustrative an not limiting the scope of this application.

### EXAMPLES

### A—Materials and Methods

[0139] Plasma Samples

[0140] Blood samples were drawn from normal human subjects (n=26) attending local university hospital for the purpose of biological testing not related to cancer (Nancy University Hospital). Clinical records were reviewed by a trained physician who ascertained that these subjects were free from acute disease, not suspected of active cancer, allergic or autoimmune conditions. This group includes patients with cancer risk factors, e.g., smoking and obesity, one of the controls had uterus cancer surgically removed 10 years prior to blood sampling and one was pregnant at time of blood sampling. Patients with chronic obstructive pulmonary disease (n=12) were either recruited in the same department (n=6) or recruited in the nuclear medicine department of the same hospital (n=6). All patients with COPD were free from exacerbation episodes at the time of blood sampling. Patients with various forms of solid tumors (n=46) were sampled at the time of PET-CT cancer extension evaluation before treatment and staging was completed by analysis of pathology samples (Nancy University Hospital). Patients with active NSCLC (n=49) were recruited in Strasbourg University Hospital and were part of a lung cancer longitudinal study. Blood samples were drawn at the time of staging. All patients attending these medical research facilities agreed to have their samples anonymously tested for research purposes by signing consent forms. Collection and analysis of these samples were declared to the French ministry of Health and to the Ministry of Research in accordance with French laws.

[0141] Bioinformatic Procedures

[0142] The analysis was performed as previously described, but with the following modifications³⁴. Each EST was retrieved and assigned to either cancer or normal set of sequences using the tissue source available in database. Each sequence was then aligned once using MegaBlast 2.2.16³⁸ against human RNA RefSeq from NCBI. The single best alignment score was retained. Each EST that did not align on more than 70% of its length was not taken into account. Positions with single base sequence variations were taken into account only if 10 bases upstream and the 10 downstream were a perfect match to RefSeq. The first and last 50 bases at each alignment extremity were deleted. Gaps and insertions were located on the last nucleotide of any n-uplet if need be.

[0143] Biochemical Analysis

[0144] N-terminal biotinylated peptides with aa sequence defined by in silico translation of RefSeq taking into account the identified K gap and peptides corresponding to canonical sequence of albumin and MRPL12 gene were purchased from different manufacturers. Samples were diluted 100-fold and IgG detection was performed on ImmunoCAP100 (Phadia, Uppsala, Sweden) using commercially available reagents and following manufacturer instructions. Samples were analyzed in duplicate with a few exceptions in FIG. 3 due to sample shortage. The order or testing of cancer and control as well as that of PAP was random. In absence of internal standards, results are expressed as fluorescence units (FU).

[0145] Statistical Method

[0146] Testing for statistical significance of EST base composition and estimation of false positives due to multiple testing was performed as previously described³⁴. Non parametric ranks comparison Wilcoxon test was used to test difference in IgG titers.

### B—Results

[0147] Identification of Protein Domains that Result from TI Gaps

[0148] To analyze EST heterogeneity on a genome-wide scale, we retrieved from noncurated dbEST³⁹ all sequences released between January 2000 and July 2007. These sequences were separated according to their normal or cancer origin, as indicated in the database. Each EST was then aligned once against all human RefSeq RNA sequences from NCBI (July 2007)⁴⁰. We first tested for statistical significance of differences occurring at any given RefSeq position between normal and cancer matrices, and then estimated false positives due to multiple testing⁴¹. Positions with statistically significant sequence differences are referred to as K if the variation is in excess in cancer and conversely N when in excess in normal.

[0149] The most important observation to be drawn from the results of Table 1 is that K gaps occurred even more commonly than K base substitutions. The bioinformatic constraints defining these gaps are stringent: a given EST position with a single base gap is taken into account only if it is flanked upstream and downstream by 10 bases that are perfect matches to RefSeq. For the 2191 K gaps located within ORF, normal and cancer gapped ESTs percentages are represented on FIG. 1 Strikingly, K insertions were 5 fold more common than N insertions and K gaps were ˜13-fold more common than N gaps. Subtracting the estimation of statistical false positives increased the ratio to 38 because p-values of K gaps are much lower than those of N gaps. Unlike K, N gaps were few and obviously contained a large proportion of false positives (Table 1). We therefore focused further analysis on K gap positions located within the ORF.

[0150] Table 2 summarizes the entries of our analysis. It is clear that there was no obvious bias resulting from differences in the number of ESTs or transcripts represented in cancer and normal sets. From Tables 1 and 2, one can estimate that in cancer cells mRNA sequence variations i.e. substitutions, insertions and gaps occurred at the rate of 1-2 per thousand bases. This largely exceeded the rate of somatic mutations: 1-2 per megabase³¹.

[0151] SBG (single base gap) in mRNA can be caused by either somatic or germinal mutation, or by RNAP omitting the reading of a single DNA base and proceeding with transcription. We also considered the hypothesis of a slipping forward or backward of the splicing machinery causing SBG to be located on the first or last exon bases. The latter mechanism was however found unlikely because 99.2% of identified SBG were not within immediate exon-intron boundaries.

[0152] The composition of missing mRNA bases were in the following order: U (47%)>C (39%)>>G (10%)>A (4%). This distribution deviated strongly from being random (goodness-of-fit chit test, two-tailed, α=0.05, P=10⁻²⁴⁸). Also, 99%, 76%, 98% and 95% of U, C, G, and A gaps, respectively, occurred within repeats of one or more identical bases. Finally, for 97% of U gaps, G was found immediately downstream. Thus genomic DNA context is determining in part the possible occurrence of mRNA gap in cancer cells. Detailed analysis of the impact of DNA context on the occurrence of TI events will be reported elsewhere.

[0153] Aberrant mRNA Detection

[0154] To verify these bioinformatics conclusions, we cloned from a lung cancer patient c-DNA library a plasmid that after qPCR and sequencing was shown with SBG occurring at the predicted position (FIG. 2 A-E). We analyzed the same number of clones obtained from the same individual normal tissue and did not find any sequence variation (data not shown). Direct sequencing of genomic DNA obtained from cancer, adjacent and normal tissue of the same patient unambiguously demonstrated the lack of either somatic or germinal mutation at this position. We can not exclude that the identified mRNA gap was artificially created during the cloning process. However it is unlikely that such event would precisely coincides with the position predicted by bioinformatics. It was thus reasonable to assume that in cancer cells a small but detectable proportion of mRNA were not faithful copy of genomic DNA.

### Materials and Methods

### Plasmid Preparation:

[0155] The pBAD plasmid (Invitrogen) was used in order to have an inductible promoter upstream of the cloned sequence. The sequence of alpha peptide amplified from the pBS-SK+ plasmid was cloned out of phase of the ATG sequence present in the CCATGG cloning site of the pBAD plasmid to produce the pBAD-Alpha plasmid. In absence of a cloned sequence, no alpha peptide is produced and the E. coli colony is white colored.

### Insert Preparation and Cloning:

[0156] cDNA from cancerous lung and adjacent normal tissue obtained from the same individual (Biochain Inc.) were amplified by PCR using oligonucleotides complementary to the CFL1 gene and the high fidelity Phusion polymerase (Finnzyme) following manufacturer recommendations. cDNA were then purified on Nucleospin Extract II columns (Macherey Nagel), visualized on agarose gel and digested with the NcoI and NheI restriction enzymes (Biolabs). The products were then ligated in the pBAD-alpha plasmid digested with the same enzymes and dephosphorylated. E. coli TOP10 (Invitrogen) cells were transformed with the ligation mix and spread on LB ampicillin (100 mg/L) arabinose (0.5%) X-Gal (80 μg/mL) plates.

### Colonies Screening:

[0157] When a CFL1 sequence with no gap is cloned, the alpha peptide is not in phase with the ATG: the colony is white colored. If a CFL1 sequence with a gap is cloned, the alpha peptide is produced, the inactive β-galactosidase (present on the genome of the bacteria) is complemented and the E. coli colony became blue (FIG. 2B).

[0158] Blue colonies had grown in LB medium supplemented with ampicillin (100 mg/L) and 1 μL of culture was screened with a Real-time PCR using CFL1 specific oligonucleotides and Syber-green I (Sigma) (FIG. 2C). The first oligonucleotide (green on the Figure) is specific of both sequences and shows that the number of plasmid copies is not different between the 2 samples. The second oligonucleotide is specific of the CFL1 Reference sequence (Refseq) and shows a difference between Ct when the sequence is not identical to the Refseq (red on the Figure).

[0159] Plasmid DNA of clones that show a difference between Ct were extracted and sequenced using an oligonucleotide present on the plasmid (GATC biotech) (FIG. 2C).

[0160] Sequences were aligned to the CFL 1 Reference sequence.

### TIAB Detection

[0161] FIG. 1 shows the percentage of deviations recorded for each K position in both the cancer (Y axis) and the normal set (X axis). K gaps were distributed on a limited number (532 or 1.4%) of transcripts (FIG. 1 insert). These mRNA have lost their canonical reading frame and would be translated into aberrant possibly immunogenic proteins. To test this hypothesis, we selected a panel of 15 K gaps representative of the 2206 ORF gap positions (Table 5, PAP 1 to 15) and that were distributed on 8 different human chromosomes. These 15 positions resulted from 8, 5 and 2 omissions of U, C and G, respectively. We verified that AA sequences predicted to result from translation of mRNA with single base gap 1) encode AA sequence longer than 12, 2) did not match with any known human protein on more than 7 consecutive AA (Swiss-Prot⁴²), 3) had no AA sequence homology with one another. We also established that selected K gaps had not been identified as cancer somatic mutations by either Sanger Institute Catalogue Of Somatic Mutations (http://www.sanger.ac.uk/cosmic)⁴³ nor by 2 recent large scale in depth cancer cell genome sequencing efforts that included 11 out of 15 genes involved in the current screening^{31,32}. K gaps did not correspond to biologically validated or putative SNP. Finally, and according to the most recent update of the dbSNP database (Sep. 21, 2007), there was no SNP introducing a frameshift identical to that caused by a single gap upstream of the defined position⁴⁴.

[0162] Blood samples are drawn from human subjects divided into two or more groups. All samples are residual sera. At least one group includes patients with active cancers. Clinical data relevant to all groups, including controls and active cancers are collected and ascertained by a trained physician. Data on controls may include cancer risk factors. Data on cancer patients may include staging and response to treatment. The groups are designed to evaluate a panel of TIABs and their specificity and sensitivity for a particular diagnostic indication such as early cancer detection, identification of cancer type, prediction of disease severity and progression, or response to treatment.

[0163] Synthetic N-terminal biotinylated peptides corresponding to these predicted aberrant peptides (PAP) were produced and coated individually onto streptavidin Elia wells (Phadia, Uppsala Sweden). Sera from 46 cancer patients (Study I) and 26 control subjects (Table 4) were incubated with either blank (non peptide coated wells) or peptide coated wells. IgG bound to the wells after washing were revealed with commercial secondary antihuman IgG invariable domain antibodies generating fluorescence. In the first analysis, the intensity of fluorescence measured with any given PAP in a given subject was subtracted from that measured in the same subject using non peptide coated streptavidin well (blank). The results showed in cancer patients versus controls statistically significant increase in IgG directed against PAP 1, 2, 4, 7 (Wilcoxon test P<2E⁻⁸; P<2E⁻³; P<5E⁻²; P<3E⁻² respectively) (FIG. 3A). There were no statistically significant differences in the level of any of the IgG detected in young (<50 years) versus older (>50 years) normal subjects (Wilcoxon tests=NS) and no significant differences due to gender of controls (Wilcoxon tests=NS). We next tested whether detection of IgG directed against PAP allowed discrimination between cancer and control subjects. The test was considered positive (FIG. 3 light and dark red) when the difference in fluorescence intensity between PAP coated wells and blank wells was higher than that of the highest value measured in the control group. Thus, specificity was arbitrarily set at 100%. Under these conditions, all but one PAP detected at least one cancer patient; 6 out of 15 PAP identified IgG levels in excess of control in more than 10% of patients. Considered together, 35 out of 46 patients (76%) with 7 forms of the most common solid tumors had IgG levels above threshold defined by the control group. FIG. 3 shows that colon, lung and head and neck cancer patients had a more diversified panel of positive signals and were positive for 11, 10 and 8 PAP respectively. Breast cancer patient IgG bound to only 6 PAP. This diversity further decreased in patients with cancer of ovary, skin and uterus (FIG. 3).

[0164] Thus with this first panel of 15 PAP, coverage and sensitivity was optimal for lung cancer. No sensitive early stage lung cancer test exists thus diagnostic at this stage is rare, and 5 year survival only 14% (46).

### TIAB Detection for Early Stage Lung Cancer Diagnostic

[0165] An important implication of this invention is that early stage lung cancer diagnostic might become possible based on simple blood testing. Analysis of data required no sophisticated statistical method, thus the risk of over fitting is minimal¹⁰. Also, our test was not a systematic search of biomarkers, but rather hypothesis driven based on bioinformatic predictions, thus the risk of bias due to multiple testing was low¹⁰. However, because of the clinical implications of such finding, we sought for replication in an independent study.

[0166] Synthetic N-terminal biotinylated peptides with AA sequence selected from the 45 PAP of table 5 constituting a panel of TIAB baits are purchased from different manufacturers and coated individually onto Reacti-Bind streptavidin coated plates (Pierce Biotechnology, Rockford, Ill.). Samples are diluted 100 fold and analyzed in duplicate. Serum IgG bound to peptides are revealed with commercial secondary antihuman IgG invariable domain antibodies conjugated with enzyme, particularly phosphatase. Reaction with a fluorescence substrate is performed using commercially available reagents. Fluorescence reading is performed on FLUOstar Galaxy microplate reader (BMG Labtech, Offenburg, Germany) following manufacturer instructions.

[0167] A TIAB of the panel is selected for a particular diagnostic indication if a threshold can be established to separate at least two groups of human subjects designed for this indication. For the selected TIAB the absolute fluorescence intensity in one group is higher than the threshold and the fluorescence measured in the same way in the other group is lower than the threshold.

### Selection of PAP to Monitor Disease Progression or Extension

[0168] We set out to select PAP from a panel in a group of patients representative of various stages of disease progression or extension following the method of the previous example (Selection of PAP/TIABs for a particular diagnostics indication). We next set out to test the efficacy of this panel of PAP in a first group of 49 patients representative of the various stages of non small cell lung cancer (NSCLC) (FIG. 4).

[0169] Blood samples were obtained from 25 healthy controls, 12 subjects with non cancer lung disease and, at the time of diagnosis, from 49 patients with different stages of NSCLC (Table 4, study II). These NSCLC patients were representative of the current status of this disease in France. In absence of reliable early stage testing procedures most of NSCLC were diagnosed with advanced diseases and only 20% were at early stage. The result of fluorescence intensity (FI) recorded for the 37 first PAPs of Table 5 for each patient and control are shown as FIG. 4A. Statistical significance of difference between groups was determined by Wilcoxon test, the results are indicated on each panel. It can be seen that the FI significantly increased in lung cancer patients compared to controls for 33 out of 37 PAP. P value of Wilcoxon tests ranged from 10⁻¹⁵ to 10⁻¹⁰ for 10 most discriminating PAP (FIG. 4B). PAP1 alone allows to perfectly discriminate controls and NSCLC (specificity=100% and sensitivity=100%).

[0170] Thus the hypothesis that by-products of translation of aberrant mRNA with SBG contributed to modulate humoral immune response to NSCLC appeared valid. We verified this by testing that IgG binding to PAP was specific of their AA sequence. We thus measured the levels of IgG directed against albumin peptide, peptide corresponding to canonical reading of genome on gene 1 and 3 of the most discriminating PAP to those of IgG directed toward their corresponding canonical peptides (CP). These CPs are encoded by the same genes and segment encoding PAP (7, 24, 28), but their AA sequences were those derived from a canonical reading of the human genome i.e. without frame shift. The data show that in lung cancer patients the titers of Ig directed against CPs were much lower than those directed against PAP (FIG. 5) and that CPs did not discriminate between cases and controls (Wilcoxon NS).

### TIAB Detection in Mice

[0171] To extend the TIAB concept to other mammals and verify that TIAB detection is caused by cancer, we sought to transpose the observation to a mouse model. We first selected 5 PAP that effectively discriminated patients with NSCLC from controls. As shown in FIG. 6 A, three of these are derived from genes highly conserved at the genomic level between mice and human. Most importantly the potentially affected bases were identical in both species this is also the case for the 4 bases upstream and the 2 downstream. We have previously shown the importance of this short DNA context allowing the occurrence of TI event³⁴. The 2 other selected PAP were from genes not conserved between mice and human. The gene that can lead to PAP 9 is present in human but not murine genome. In mice, the occurrence of SBG at predicted position of the gene leading to translation of PAP 2 introduced a stop codon after encoding 7 AA. An additional negative control corresponding to CP of PAP 7 was also included. Immuno-competent (C57B16) mice (n=12) were inoculated subcutaneously with mice Lewis Lung Cancer (LLC1)^{45,46}. Ig G binding to 5 PAP and one CP were measured before LLC1 transplantation and at weekly interval for up to 21 days. At this time, average tumor sizes were 3.15+/−0.4 cm³. As shown in FIG. 6B, Ig G against PAP 7, PAP 48 and PAP 62 increased significantly 2 weeks after tumor implantation. P values of paired t-Test were 1*10⁻⁴, 3*10⁻⁴ 9*10⁻⁴ for PAP 7, PAP 48 and PAP 62 respectively. We did not observe significant increase of the level of IgG directed against CP7.

### Materials and Methods

[0172] Cell Culture

[0173] The murine Lewis Lung carcinoma cell line (LLC1) was obtained from American Type Culture Collection (ATCC). The cells were cultured in 75 cm² flask containing RPMI 1640 medium (Invitrogen, France) supplemented with 10% FBS, streptomycin (0.1 mg/ml) and penicillin (100 units/ml) and maintained at 37° C. in humidified atmosphere containing 5% CO2 in air.

[0174] Tumor Transplantation

[0175] LLC1 tumor cells (5*10⁵ cells in a 0.1 ml final volume of RPMI 1640) were injected subcutaneously (s.c.) in the right hindquarters area of 7 weeks C57b1/6 female mice (Janvier, France). 21 days after s.c. injection of LLC1 cells, the tumor volumes were measured by measuring bisecting diameters of each tumor and calculating using the formula V=a²*b*0.5236 with “a” as the larger diameter and “b” as the smaller diameter. Before s.c. injection of the tumor cells, a 100 μl of sample blood was taken under isoflurane anaesthesia as the T0. Once a week, a sample of 100 μl blood was taken in EDTA tube under isoflurane anaesthesia as the T 7, 14 and 21 days.

[0176] Clinical Validation

[0177] To validate the fact that a combination of PAP of the invention can lead to robust lung cancer diagnosis, we conducted large scale retrospective case control study that included 161 control subjects that were healthy blood donor with age ranging from 18 to 65 years old and that did not excluded smokers. The patients were 140 individuals with early stage non small cell lung cancer. Blood from these patients was collected at time of diagnosis. All patients in this group matched surgical intervention criteria and were thus early stage for the large majority. All patients in this group underwent surgery thus postoperative staging and pathological classification was obtained for all patients. It must be emphasized that patients in this group did not receive pre-operative chemotherapy or radiotherapy. The clinical characteristics of controls and patients are shown as table 4 study III. Patients and controls were tested for TIAB directed against 6 PAP measured under specific experimental conditions. Statistical analysis of the diagnostic value of this combination of markers was determined using support vector machine. SVM was retained after analyzing the performance of alternative classification methods. SVM defines a 6 dimensions hyperplane and provides a measure of individual distance of controls and patients to this hyperplane. The data are therefore presented as the relative distance to the hyperplane for each subject. It can be seen that the 2 populations of cancer patients and controls are well separated (FIG. 7A). The overall test performance was 86% sensitivity and 97% specificity. Only 5 controls are on the wrong side of hyperplane. And 19 patients with lung cancer are on the wrong side of hyperplane. After iterative cross validation sensitivity and specificity were 82% and 95% respectively. Sensitivity is not different between younger or elder patients (FIG. 7B). It can be seen from examination of the data that sensitivity of current test is lower for patients with adenocarcinomas that are diagnosed with 76% sensitivity in contrast test performance are >90% sensitivity for the other classes of non small cell carcinoma. These difference in test performance were statistically significant (FIG. 7C).

[0178] The benefit of surgery for lung cancer is well established. This benefit does not translate only in term of increased life expectancy but into definitive cure that is ascertained by the analysis of number of diagnosis and number of death. In France these numbers are ≈33000 new diagnosis and ≈28000 deaths. Thus it can be firmly ascertained that 5000 patients are cured from lung cancer i.e. 15%. All lung cancer survivors undergo surgical procedure but not all patients with lung cancer undergoing surgery are cured. Currently there is no procedure able to distinguish individuals that will benefit from alone surgery from those that will not. We thus sought to evaluate the performance of this test based on 6 PAP with respect to prediction of severity at the time of diagnosis. To achieve this we subdivided the studied population into 2 groups. In the first group are patients for whom we had documented evidence of disease free survival longer than 36 months. In the second group, patients were either deceased or with recurrence of the disease occurring within 36 months post surgery. We did not include patients for whom follow up was shorter than 36 months simply because the follow up time of these individuals was to short to ascertain outcome. We then compared the distance to the hyperplane for these 2 groups of patients that were of similar size. It is clear from the data of FIG. 7D that patients that strongly benefited from surgery and were disease free at 3 years had a distance to hyperplane significantly (P=0.005) longer than those that benefited less from surgery. This finding bears 2 immediate applications. First, it is likely that this test will identify patients with early stage lung cancer and that will most favourably benefit from surgery. Second appropriate alternative therapeutic intervention should be set in place for patients diagnosed with positive test but with a low distance to hyperplane. Such alternative measure may be conventional radio or chemotherapy. However our current interpretation of the data is that patients with low immunological response to the presence of a lung cancer are less likely to benefit from surgery alone. In this perspective it might be useful to pharmacologically boost their immunological response prior or shortly after surgery. We have therefore exemplified here the importance of PAP discovery as guide for future innovative therapeutic strategy.

[0179] We next sought to develop test that are lung cancer specific by testing various combinations of PAP under specific experimental condition. A novel combination of PAP achieved 100% specificity and 90% sensitivity for lung cancer versus controls. Most importantly when applied to patients with breast cancer only 3 out of 20 patients with breast cancer showed positive test. Thus in the comparison of lung versus breast cancer, 10 and 15% of patients are misclassified respectively. We considered that this rate of error will lead to unnecessary and costly downstream diagnosis procedure. The follow up diagnosis for lung cancer is chest CT scan while that of breast cancer is mammography or echography. Pet scan is useful for evaluation of disease extention. We thus developed specific tests able to more efficiently distinguish lung from breast cancer. Four combinations of PAP were found to achieve this objective. These combinations of markers are exemplified in FIG. 8B. In all 4 cases lung cancer patients are distinguished from breast cancer patients with one to three patients in overlap. The clinical significance of these combinations of markers are presented because their predictive value with respect to the severity of the disease requires further evaluation. We indeed predict that, similar to what has been exemplified for lung, a specific combination of PAP will reveal in large scale study predictive of clinical outcome for breast cancer. Before this can be achieved a specific breast cancer test is needed. We currently have identified a combination of 3 markers that under specific conditions identifies breast cancer from control with 60% sensitivity and 95% specificity (FIG. 8C). Our current view is that it will be possible to identify a combination of PAP that will indicate the presence of most common cancers at early stage from a simple blood test. Secondary combinations of PAP will provide accurate indication of the precise localisation of the disease thereby allowing the selection of adequate secondary diagnostic procedure e.g. CT scan, mammography, ultrasonography, fibroscopy, endoscopy, biopsies. A third line of PAP testing will provide prognostic for each individual response to surgical treatment and therefore indication as to the need of additional therapeutic measures. A fourth line of PAP will provide tools for monitoring of disease recurrence and/or its favourable response to treatment.

### C—Discussion

[0180] We have identified a novel and predictable source of human cancer cell protein heterogeneity that triggers weak but diversified production of IgG. Accurate detection of these low titers specific IgG creates promising opportunities for early stage cancer diagnostic and can provide information regarding disease extension. This discovery stems from convergence of bioinformatic predictions with immunological detection of specific IgG directed toward aberrant peptides. Proteins containing PAP sequence can not be translated from normal human mRNA, but solely from mRNA that have lost their canonical genomic information due to single base gap.

[0181] Our data support the conclusion that predicted mRNAs with single gap are present in cancer cells and at least partially translated. Occurrence of identified EST gaps is too common to be generated by cancer somatic mutations^{31,32}. Current estimates of cancer somatic mutation rate lead to a prediction of 12 deletions out of which 4 would be single gaps. Instead, we observed 2206 statistically significant events. Also, none of the selected gaps corresponded to either putative or biologically validated SNPs⁴⁴. Thus, it is unlikely that mRNA gaps arose at the genomic level and must thus occur downstream, i.e., during or shortly after transcription.

[0182] It has been established that pre and mature mRNA bases can be modified by enzymes, but no known human mRNA editing enzymes have been shown to remove a single base from single stranded human RNA⁴⁷. It has been shown that Trypanosoma mitochondrial mRNA editosome is capable of U specific deletion⁴⁸. However, no homologs of Trypanosoma and Leishmania editosome proteins were found in the human genome. Further, this editing mechanism is U specific and cannot explain the observed 53% of human cancer non-U gaps. We have considered the possibility that slipping forward or backwards of splicing machinery could introduce single base gaps that would affect either exon's last or first base⁴⁹. None of the tested gaps were located on such positions. Moreover, the latter mechanism was found unlikely because 99.2% of more than 2000 identified SBG were not within immediate exon-intron boundaries. Finally, it is clear that a short DNA context exerts a strong influence on the occurrence of cancer EST gaps similar to what was demonstrated for EST base substitutions^{34,36,37}. We therefore currently hypothesize that skipping the incorporation of a single base by Pol II, i.e., TI is causing the occurrence of gapped mRNA.

[0183] We have further exemplified that mRNA with simple gap occurring at predicted position occur in cancer cell in absence of somatic or germinal mutation. Thus, the bioinformatic concept of transcription infidelity is biologically validated in human.

[0184] The second most important consequence of the finding reported here is that a canonical reading of the human genome is insufficient to explain cancer cell heterogeneity. We therefore propose that transcription infidelity increases in cancer cells. The evidence supporting this proposal are as follows. First, we have previously shown by DHPLC that cancer cells mRNAs are more heterogeneous than those isolated from normal cells³⁴. Increased sequence variations in cancer versus normal mRNA is confirmed by independent studies relying on SAGE experiments. Second, analysis of all available human mRNA derived sequences showed statistically significant increase in base substitutions, insertions and gaps (SBG) in cancer relative to normal libraries. The occurrence of these events is 10³ more common than that of cancer somatic mutations. If present at the DNA level this rate of mutations would most likely be lethal. It is thus reasonable to assume that these variations occurred during or shortly after transcription and affect only pre and mature mRNA i.e. transient molecules. Third, there are currently no known molecular mechanisms other than TI that can either remove or add single base from mRNA and then reassemble the sequence. Thus, direct observation of predicted SBG occurring in human lung cancer cells in absence of mutation at the DNA level indicated that RNAP can skip the reading of a single DNA base and nevertheless proceed. Finally, studies from other groups showed that TI occurs in vivo even in absence of cancer. Specifically, in Brattleboro rat GA deletion occurring within GAGAG sequence reverts vasopressin transcript to normal thereby suppressing diabetes insipidus. Transcription frame shift affecting repetitive A sequence of (3 amyloid and ubiquitin B yield proteins that are detected by immunological staining of Alzheimer disease plaque.

[0185] We currently favor the hypothesis that increased cancer mRNA heterogeneity is a consequence rather than a cause of carcinogenesis. Indeed, we are detecting specific IgG directed against our current PAP panel in sera of children that developed anaplastic large cell lymphoma and that carry anaplastic lymphoma kinase (ALK) translocation (G Delsol and B Bihain, unpublished results)⁵⁰. Rodent studies have demonstrated that translocation causing constitutive expression of this kinase is a primary oncogenic event that alone is sufficient to cause transformation⁵¹. Thus, detection of positive signals that reflect the production of abnormal mRNA encoding functionally non related genes—that are not part of this specific translocation—suggests that the phenomenon occurs as a consequence of this oncogenic lesion. However, it is possible that TI contributes to accelerate carcinogenesis. Indeed, several genes involved in the regulation of transcription, translation and DNA repair—not included in the current study because putative gene function was not part of the PAP selection process—are identified through bioinformatics with K gap. It is thus possible that we are confronted with an autocatalytic process that increases in diversity and intensity as the severity of the diseases progresses.

[0186] Bioinformatics indicated that the occurrence of SBG in mRNA is a common feature of cancers. Nevertheless, differences in IgG profiles were also found in lymphoma patients (N=27). PAP 1 and 2 that are commonly positive in NSCLC were negative in both follicular and anaplastic lymphoma patients. This contrasted with PAP 4 and 7 that were commonly positive in anaplastic large cell lymphoma but not in follicular lymphoma. Therefore, with the diversity (>than 2000 candidates) of the available panel of PAP we propose to design tumor specific PAP panels. We have exemplified this concept by demonstrating the capacity of PAP to effectively separate patients with lung cancer from those with breast cancer.

[0187] Our conclusion that mRNA with single base gap are translated at least partially into aberrant proteins suggests that in cancer cells the nonsense-mediated mRNA decay might be defective⁵². Considering current proteomic efforts, it is surprising that such highly diversified panel of aberrant proteins has remained thus far undetected. The explanation is 2 fold. 1) Protein identification by mass spectrometry relies on matching observed with predicted spectra defined by known or putative AA sequences⁵³. The The AA sequences of aberrant proteins resulting from mRNA gaps are not in the current protein databases (Swiss-Prot/TrEMBL⁴²) and thus can not be identified by MS/MS analysis. 2) Proteasome rapidly degrades aberrant proteins yielding potentially aberrant immunogenic peptides⁵⁴.

[0188] The notion that TI increases in cancer leads to question the current strategy of cancer biomarkers discovery and to propose novel methods. Systematic cancer proteomic approaches led to conflicting results, divergences were attributed to variations in pre-analytical conditions. This might very well be the case, but an alternate explanation must now be considered. If one accepts that cancer cell protein heterogeneity largely exceeds current estimates, it becomes possible that sample sizes were insufficient to thoroughly probe a highly diversified repertoire of protein variants. Another limitation of current proteomic is that, as previously mentioned, mass spectrometry data are currently interpreted with a canonical reading of the human genome. Thus, proteins with aberrant AA sequences may have escaped proper identification. It is therefore likely that not only methodological but conceptual changes will be needed before cancer proteomic succeeds. By considering transcription infidelity according to the present invention, more reliable and relevant biomarkers can be identified.

[0189] We have shown in mouse cancer cells 3 aberrant proteins encoded by highly conserved but functionally unrelated genes. The most abundant aberrant protein in LLC1 was that derived from Poly(A)binding protein cytoplasmic 1 (PABPC1) (PAP 62). PABPC1 normally binds to mRNA poly A and modulates the nonsense-mediated decay (NMD) pathway that degrades mRNA with premature stop. Tethering of PABPC1 downstream of premature termination codon abolish NMD. The second most abundant aberrant protein in LLC1 was encoded by vimentin gene (VIM) (PAP 48). Vimentin is a type III intermediate filament protein that forms both homo and hereopolymeric structures contributing to support cellular membranes, to keep the nucleus and organelle in defined places as well as to associate with microtubule. The third most abundant aberrant protein was that encoded by the IK gene (PAP 7). IK normal function is that of a cytokine inhibiting interferon gamma induced expression of class II major histocompatibility complex. IK is also identified as chondrosarcoma associated protein 2. The consequences of the presence in cancer cells of these variants are currently unknown. However, the possibility of strong interferences with cancer cell biology must not be excluded and their contribution to cancer cell metabolic, morphological changes as well as mRNA heterogeneity will require further investigation. At this stage we have been able to establish that most of the PAP modulated humoral immune response to NSCL cancer in human and LLC1 in mice. We predict that production by cancer cells of these aberrant proteins might significantly alter cell function through dominant negative or positive effect. Thus, these three highly conserved genes might provide novel therapeutic targets.

[0190] Analysis of mice lung cancer model established a causal relationship between the presence of LLC1 and the detection of anti-PAP IgG. Thus anti-PAP IgGs appeared as part of a normal and timely immune response triggered by cancer. Interestingly in mice, the anti-PAP IgG levels were much higher (100 fold) than those measured in humans with lung cancer. The facts that the relative size of the lung tumor were also much greater in mice and that LLC1 were implanted ectopically in subcutaneous tissue provided possible explanations for these differences.

[0191] The present invention therefore describes a novel mechanism through which cancer modulates humoral immune response. At this stage we propose that a novel mechanism TI contributes to dramatic increase in the heterogeneity of cancer cell mRNA, part of these aberrant messages are translated into aberrant protein some of which accumulated in cancer cells and most of which modulated cancer humoral immune response. The present invention thus provides products and methods allowing to correctly differentiate patients with cancer from patients without active cancer. It is thus possible to elaborate systematic biochemical screening of at risk individuals, perform all body imaging on patients with positive tests, and increase the proportion of subjects diagnosed at early stage.

TABLE 1
Results of statistical testing

| | | | | | | (K − LBE)/ |
|---|---|---|---|---|---|---|
| | K | LBE | N | LBE | K/N | (N − LBE) |
| Gaps | 2,761 | 11 | 216 | 144 | 12.78 | 38.19 |
| Gaps within ORF | 2,191 | | 162 | | 13.52 | |
| Substitutions | 1,894 | 92 | 928 | 186 | 2.04 | 2.43 |

LBE refers to location based estimator of the false positive rate.

TABLE 2
Results of bioinformatics analysis

| | Normal | Cancer |
|---|---|---|
| ESTs retrieved from NCBI | 3,949,323 | 3,043,498 |
| Number of transcripts with EST match | 34,974 | 34,788 |

| | |
|---|---|
| Number of transcripts with EST match | 33,111 |
| Nucleotides analyzed | 88,372,747 |
| Positions defined by >70 ESTs | 2,829,135 |
| Positions matching statistical constraints | |
| Substitutions | 5,784 |
| Gaps | 3,790 |

[0192] Results of analysis drawn after retrieval of all available human ESTs release to noncurated public database from January 2000 to July 2007. The table also shows the number of positions matching first (effective >70) and second statistical test criteria.

[0193] Table 3a: Nucleic and amino acid sequences of the 2206 gapTI peptides. SEQ ID NOs 1-2206 as referred to in this document represent the peptide sequences depicted in column 6 of Table 3a.

[0194] Table 3b: Nucleic and amino acid sequences of the 1128 insertion TI peptides. SEQ ID NOs 2207-3334 as referred to in this document represent the peptide sequences depicted in column 6 of Table 3b.

TABLE 4
Clinical data of control individuals and cancer subjects.

| | | Age | | | |
|---|---|---|---|---|---|
| | Number | (Years) | Female | Male | Stage* |
| Healthy | 26 | 55 ± 18 | 13 | 13 | — |
| Control | | | | | |
| Chronic | 12 | 55 ± 11 | 2 | 10 | — |
| Obstructive | | | | | |
| Pulmonary | | | | | |
| Disease | | | | | |
| All Cancer | 46 | 61 ± 11 | 26 | 20 | |
| STUDY I | | | | | |
| Colon | 9 | 65 ± 13 | 1 | 8 | T+N0M0 → T+N+M+ |
| Lung | 9 | 67 ± 7 | 2 | 7 | T+N0M0 → T+N+M+ |
| (7 NSCLC + | | | | | |
| 2 SCLC) | | | | | |
| Breast | 9 | 60 ± 11 | 9 | 0 | T+N0M0 → T+N+M+ |
| Ovarian | 4 | 58 ± 6 | 4 | 0 | T+N0M0 → T+N+M+ |
| Uterus | 5 | 50 ± 8 | 5 | 0 | T+N0M0 → T+N+M0 |
| Head & | 7 | 60 ± 11 | 3 | 4 | T+N0M0 → T+N+M+ |
| Neck | | | | | |
| Melanoma | 3 | 58 ± 14 | 2 | 1 | T+N+M0 → T+N+M+ |
| Lung Cancer | 49 | 67 ± 13 | 10 | 39 | |
| STUDY II | | | | | |
| (NSCLC) | | | | | |
| | 10 | 66 ± 14 | 3 | 7 | N0M0 |
| | 25 | 68 ± 14 | 4 | 21 | N+M0 |
| | 14 | 67 ± 10 | 3 | 11 | N+M1 |

International Union Against Cancer (UICC): TNM Classification of
malignant tumours. 4th ed. Hermanek P, Sobin LH, eds. Berlin,
Heidelberg, New York: Springer Verlag; 1987. Revised 1992.

| | | | | |
|---|---|---|---|---|
| n | % | Age (y) | min | max |

Study III

| | | | | | |
|---|---|---|---|---|---|
| Controls | 161 | | 42 ± 14 | 18 | 65 |
| NSCLC | 140 | | 61 ± 11 | 38 | 86 |
| T1-2-3-4N0M0 | 78 | 56 | 61 | 38 | 86 |
| T+N+M0 | 43 | 31 | 69 | 44 | 86 |
| T+N+M+ | 19 | 13 | 61 | 46 | 77 |
| ADK | 67 | 48 | 60 | 45 | 82 |
| Squamous | 40 | 33 | 65 | 48 | 86 |
| Other | 33 | 19 | 58 | 38 | 82 |

Study IV

| | | | | | |
|---|---|---|---|---|---|
| Controls | 20 | | 47 ± 13 | 20 | 62 |
| NSCLC | 20 | | 61 ± 10 | 48 | 83 |
| T1N0M0 | 9 | 45 | 60 ± 7 | 49 | 70 |
| T2N0M0 | 11 | 55 | 62 ± 12 | 48 | 83 |
| Breast | 20 | | 56 ± 10 | 36 | 68 |
| Grade level 1 | 4 | 20 | 60 ± 6 | 53 | 67 |
| Grade level 2 | 9 | 45 | 56 ± 10 | 40 | 68 |
| Grade level 3 | 7 | 35 | 54 ± 11 | 36 | 68 |

TABLE 5
Characteristics of 45 PAP polypeptides

| | | | | | | | | SEQ | PAP |
|---|---|---|---|---|---|---|---|---|---|
| | Accession | | peptide | | | | PAP | ID | coordonates |
| Gene | Number | position | length | % devN | % devC | peptide | number | NO | on SEQ ID |
| MRPL12 | NM_002949.2 | 687 | 30 | 3.85 | 17.74 | WRRWAAPWFWSSLQLGGLVFRGPG | 1 | 1 | 1-30 |
| | | | | | | PRARSR | | | |
| DECRI | NM_001359.1 | 257 | 35 | 9.30 | 41.38 | NLNSFHLFKKRCYHLIVFKEKWHS | 2 | 2 | 1-35 |
| | | | | | | LLGEVLALVKE | | | |
| ALDOA | NM_184041.1 | 602 | 25 | 0.42 | 4.26 | GWMGCLSAVPSTRRTELTSPSGVV | 3 | 3 | 1-25 |
| | | | | | | C | | | |
| COX4I1 | NM_001861.2 | 549 | 18 | 2.43 | 9.05 | RKALTKSGWPSRPRGCWT | 4 | 4 | 1-18 |
| TPII | NM_000365.4 | 149 | 13 | 1.59 | 8.59 | LPLLPISTSPGRS | 5 | 5 | 1-13 |
| ENOL | NM_001428.2 | 548 | 17 | 1.13 | 8.23 | SLTWLATLKSSCQSRRS | 6 | 6 | 1-17 |
| IK | NM_006083.3 | 614 | 19 | 0.00 | 15.38 | LCFKRYELRLPAKRKRKRN | 7 | 7 | 1-19 |
| LYZ | NM_000239.1 | 78 | 12 | 8.58 | 41.03 | ARSLKGVSWPEL | 8 | 8 | 1-12 |
| PRR4 | NM_007244.2 | 215 | 30 | 0.00 | 30.14 | VIVVTKMMVLSRDHQNQEAITAIL | 9 | 1770 | 2-31 |
| | | | | | | PHLLFK | | | |
| CCNBI | NM_031966.2 | 539 | 27 | 0.93 | 22.73 | LILPLQAQWKHLDVPLQKKTCVRL | 10 | 10 | 1-27 |
| | | | | | | SLM | | | |
| CRABP2 | NM_001878.2 | 537 | 37 | 2.00 | 18.62 | STSESEWPQVEPRPKPTTGHAHRP | 11 | 11 | 1-37 |
| | | | | | | ASLPPPSHPLLLG | | | |
| HSPA8 | NM_153201.1 | 165 | 20 | 0.09 | 2.23 | PMIRETEPLQAMSPLRTLNG | 12 | 12 | 1-20 |
| LCPI | NM_002298.2 | 227 | 16 | 1.31 | 18.89 | LPKLILMAMDTSASMS | 13 | 13 | 1-16 |
| PSMDI3 | NM_02817.2 | 223 | 21 | 1.60 | 12.57 | LPKEMVSLSFMKTLSVNLNTG | 14 | 14 | 1-21 |
| FH | NM_000143.2 | 141 | 16 | 0.00 | 21.13 | FGLRTRLEWQAKIPSG | 15 | 15 | 1-16 |
| GPI | NM_000175.2 | 1255 | 16 | 5.56 | 33.04 | PMASMLFTSSSTKAPR | 20 | 44 | 1-16 |
| ACO2 | NM_001098.2 | 623 | 12 | 5.17 | 20.21 | MLWMSWLGSPGS | 21 | 532 | 10-21 |
| NDUFBS | NM_002492.2 | 194 | 13 | 4.84 | 15.08 | LSSDLLDSMTGVF | 22 | 1063 | 1-13 |
| NDUFS3 | NM_004551.1 | 195 | 23 | 4.41 | 17.95 | LESMWLKSCPSMSNKFRCPASMS | 23 | 1380 | 1-23 |
| NDUFABI | NM_005003.2 | 366 | 19 | 2.07 | 13.08 | WTKWRLSWPWKTNLGLKFL | 24 | 1413 | 1-19 |
| ECHI | NM_001398.2 | 871 | 30 | 1.59 | 14.61 | RFPARAPWRCRAPRSTCCIP | 25 | 581 | 1-30 |
| | | | | | | ATIRWPRAST | | | |
| NPMI | NM_002520.5 | 589 | 11 | 8.33 | 27.59 | LEVVARFHRKK | 26 | 1075 | 1-11 |
| ECHSI | NM_004092.2 | 149 | 22 | 5.13 | 12.41 | SPRVLTLSTSSQKKEGRITPWG | 27 | 1330 | 1-22 |
| CFLI | NM_005507.2 | 447 | 30 | 0.48 | 4.31 | LSRCCQIRTAAMPSMMQPMRP | 28 | 1457 | 1-30 |
| | | | | | | RRARRRIWC | | | |
| MRPL3 | NM_007208.2 | 275 | 30 | 1.76 | 12.38 | LLEVFMERVVHGGMSIFLKKM | 29 | 1769 | 1-30 |
| | | | | | | SHSLSSWSL | | | |
| CYCS | NM_018947.4 | 351 | 12 | 8.78 | 35.77 | WRIPRSTSLEQK | 35 | 1972 | 1-12 |
| B2M | NM_004048.2 | 193 | 15 | 2.58 | 10.85 | AMCLGFIHPTLKLTY | 37 | 1323 | 1-15 |
| ILF2 | NM_004515.2 | 360 | 19 | 1.92 | 15.81 | HLKCKLKKFDRWDPIKRGQ | 38 | 1373 | 1-19 |
| BCAP31 | NM_005745.6 | 194 | 27 | 1.54 | 8.72 | LLCCFSAFPSFLLKDGRRFSS | 39 | 1499 | 1-27 |
| | | | | | | PGWWSC | | | |
| PHB | NM_002634.2 | 703 | 12 | 11.69 | 20.41 | SSLLRATPRQLS | 40 | 1098 | 1-12 |
| PGKI | NM_000291.2 | 567 | 11 | 0.33 | 5.71 | LALLTEPTAPW | 41 | 57 | 1-11 |
| UQCRCI | NM_003365.2 | 323 | 30 | 1.44 | 10.55 | WSIWLSREQRIGLAVPWRRRWR | 44 | 1270 | 1-30 |
| | | | | | | AWGPILMP | | | |
| NDUFVI | NM_007103.2 | 657 | 29 | 2.47 | 11.94 | LWCAGLGPTSVERRQRSSSPLR | 46 | 1757 | 1-29 |
| | | | | | | ASRASPA | | | |
| ATF4 | NM_001675.2 | 1387 | 11 | 5.50 | 17.22 | SCPPLQIIPLV | 47 | 864 | 1-11 |
| VIM | NM_003380.2 | 652 | 30 | 0.00 | 2.49 | TWPRTSCASGRNCRRRCFRERK | 48 | 1276 | 2-31 |
| | | | | | | PKTPCNLS | | | |
| PTTG1 | NM_004219.2 | 236 | 11 | 1.82 | 19.77 | WELSTELQKSL | 49 | 1336 | 1-11 |
| PABPC1 | NM_002568.3 | 1293 | 19 | 1.16 | 4.17 | VELRKRWNGRRNLSANLNR | 62 | 1079 | 1-19 |
| CDKNIA | NM_000389.2 | 378 | 30 | 0 | 6.09 | LAPHLLCCRGQQRKTMWTCHCL | 70 | 80 | 1-30 |
| | | | | | | VPLCLAQG | | | |
| PRDX6 | NM_004905.2 | 322 | 30 | 0.31 | 3.66 | VKSPQKSYLFPSSMIGIGSLPS | 66 | 1396 | 1-30 |
| | | | | | | CWACWIQQ | | | |
| RPL13A | NM_012423.2 | 355 | 17 | 0.63 | 4.88 | TTRKSGWWFLLPSRSCV | 68 | 1810 | 1-17 |
| APEX1 | NM_001641.2 | 419 | 30 | 0.81 | 8.72 | QRKMTKRQQERAQPCMRTPQIR | 74 | 847 | 1-30 |
| | | | | | | KPHPVANL | | | |
| MLF2 | NM_005439.1 | 343 | 31 | 2.27 | 12.64 | PGLPAAGCSRLELSPPLGCWEC | 82 | 1451 | 1-31 |
| | | | | | | RVVSWTCLG | | | |
| TUBB | NM_178014.2 | 370 | 30 | 0.40 | 9.76 | LARSLDQTTLYLVSLGQVTTGP | 94 | 2119 | 1-30 |
| | | | | | | KATTQRAP | | | |
| LAPTM4A | NM_014713.3 | 758 | 21 | 2.01 | 7.03 | MLCTLPLKHLLSTFCQPMKWP | 69 | 1864 | 1-21 |
| CCT8 | NM_006585.2 | 536 | 22 | 0.21 | 5.70 | WYVVLQKTFEILMKSHLYFVPP | 86 | 1699 | 1-22 |

“PAP number” is the number of the PAP as referred to in the text.
“SEQ ID NO” is the identifier in the Sequence Listing.
“PAP coordonates on SEQ ID” designates the position of the amino acid residues of the PAP polypeptide in the quoted SEQ ID.

TABLE 6
Five negative controls

| symbol | gene name | sequence |
|---|---|---|
| | ALB | QHKDDNPNLPRLVRP |
| CP on | MRPL12 | IQQLVQDIASLTLLE |
| gene 1 | | ISDLNELLKKTLKIQ |
| CP 7 | IK | ALLQKVRAEIASKEKEEEE |
| CP 28 | CFL1 | FVKMLPDKDCRYALY |
| | | EDATYTKESKKEDLV |
| CP 24 | NDUFABI | LDQVEIIMAMEDEFGFEIP |

### REFERENCES

[0195] 1. Weinberg, R. in The biology of cancer 655-724 (Garland Science, Taylor and Francis Group, LLC, 2007).
[0196] 2. Vogelstein, B. & Kinzler, K. W. Cancer genes and the pathways they control. Nat Med 10, 789-99 (2004).
[0197] 3. ASCO. American Society of Clinical Oncology policy statement update: genetic testing for cancer susceptibility. J Clin Oncol 21, 2397-406 (2003).
[0198] 4. Fackenthal, J. D. & Olopade, O. I. Breast cancer risk associated with BRCA1 and BRCA2 in diverse populations. Nat Rev Cancer 7, 937-48 (2007).
[0199] 5. Guillem, J. G. et al. ASCO/SSO review of current role of risk-reducing surgery in common hereditary cancer syndromes. J Clin Oncol 24, 4642-60 (2006).
[0200] 6. van de Vijver, M. J. et al. A gene-expression signature as a predictor of survival in breast cancer. N Engl J Med 347, 1999-2009 (2002).
[0201] 7. Anderson, N. L. et al. The human plasma proteome: a nonredundant list developed by combination of four separate sources. Mol Cell Proteomics 3, 311-26 (2004).
[0202] 8. Wulfkuhle, J. D., Liotta, L. A. & Petricoin, E. F. Proteomic applications for the early detection of cancer. Nat Rev Cancer 3, 267-75 (2003).
[0203] 9. Ishikawa, N. et al. ADAM8 as a novel serological and histochemical marker for lung cancer. Clin Cancer Res 10, 8363-70 (2004).
[0204] 10. Ransohoff, D. F. Rules of evidence for cancer molecular-marker discovery and validation. Nat Rev Cancer 4, 309-14 (2004).
[0205] 11. Ransohoff, D. F. Bias as a threat to the validity of cancer molecular-marker research. Nat Rev Cancer 5, 142-9 (2005).
[0206] 12. Stroun, M. et al. Neoplastic characteristics of the DNA found in the plasma of cancer patients. Oncology 46, 318-22 (1989).
[0207] 13. Boddy, J. L., Gal, S., Malone, P. R., Harris, A. L. & Wainscoat, J. S. Prospective study of quantitation of plasma DNA levels in the diagnosis of malignant versus benign prostate disease. Clin Cancer Res 11, 1394-9 (2005).
[0208] 14. Boddy, J. L. et al. The role of cell-free DNA size distribution in the management of prostate cancer. Oncol Res 16, 35-41 (2006).
[0209] 15. Lund, A. H. & van Lohuizen, M. Epigenetics and cancer. Genes Dev 18, 2315-35 (2004).
[0210] 16. Ducasse, M. & Brown, M. A. Epigenetic aberrations and cancer. Mol Cancer 5, 60 (2006).
[0211] 17. Goessl, C. et al. Fluorescent methylation-specific polymerase chain reaction for DNA-based detection of prostate cancer in bodily fluids. Cancer Res 60, 5941-5 (2000).
[0212] 18. Jeronimo, C. et al. Quantitative GSTP1 hypermethylation in bodily fluids of patients with prostate cancer. Urology 60, 1131-5 (2002).
[0213] 19. Reibenwein, J. et al. Promoter hypermethylation of GSTP1, AR, and 14-3-3sigma in serum of prostate cancer patients and its clinical relevance. Prostate 67, 427-32 (2007).
[0214] 20. Wang, Y. et al. Identification of epigenetic aberrant promoter methylation of RASSF1A in serum DNA and its clinicopathological significance in lung cancer. Lung Cancer 56, 289-94 (2007).
[0215] 21. Diehl, F. et al. Detection and quantification of mutations in the plasma of patients with colorectal tumors. Proc Natl Acad Sci USA 102, 16368-73 (2005).
[0216] 22. Korshunova, Y. et al. Massively parallel bisulphite pyrosequencing reveals the molecular complexity of breast cancer-associated cytosine-methylation patterns obtained from tissue and serum DNA. Genome Res (2007).
[0217] 23. Bentley, D. R. Whole-genome re-sequencing. Curr Opin Genet Dev 16, 545-52 (2006).
[0218] 24. Meyer, M., Stenzel, U., Myles, S., Prufer, K. & Hofreiter, M. Targeted high-throughput sequencing of tagged nucleic acid samples. Nucleic Acids Res 35, e97 (2007).
[0219] 25. Tan, E. M. Autoantibodies as reporters identifying aberrant cellular mechanisms in tumorigenesis. J Clin Invest 108, 1411-5 (2001).
[0220] 26. Finn, O. J. Immune response as a biomarker for cancer detection and a lot more. N Engl J Med 353, 1288-90 (2005).
[0221] 27. Zinkernagel, R. M. What is missing in immunology to understand immunity?Nat Immunol 1, 181-5 (2000).
[0222] 28. Wang, X. et al. Autoantibody signatures in prostate cancer. N Engl J Med 353, 1224-35 (2005).
[0223] 29. Somers, V. A. et al. A panel of candidate tumor antigens in colorectal cancer revealed by the serological selection of a phage displayed cDNA expression library. J Immunol 169, 2772-80 (2002).
[0224] 30. Hardouin, J., Lasserre, J. P., Sylvius, L., Joubert-Caron, R. & Caron, M. Cancer immunomics: from serological proteome analysis to multiple affinity protein profiling. Ann NY Acad Sci 1107, 223-30 (2007).
[0225] 31. Sjoblom, T. et al. The consensus coding sequences of human breast and colorectal cancers. Science 314, 268-74 (2006).
[0226] 32. Wood, L. D. et al. The genomic landscapes of human breast and colorectal cancers. Science 318, 1108-13 (2007).
[0227] 33. Nelkin B, P. D., Robinson S, Small D, Vogelstein B. (ed. Owens, A., Coffey, D S, Baylin, S B) 441-460 (Academic Press, New York, 1982).
[0228] 34. Brulliard, M. et al. Nonrandom variations in human cancer ESTs indicate that mRNA heterogeneity increases during carcinogenesis. Proc Natl Acad Sci USA 104, 7522-7 (2007).
[0229] 35. Armache, K. J., Kettenberger, H. & Cramer, P. The dynamic machinery of mRNA elongation. Curr Opin Struct Biol 15, 197-203 (2005).
[0230] 36. Kashkina, E. et al. Template misalignment in multisubunit RNA polymerases and transcription fidelity. Mol Cell 24, 257-66 (2006).
[0231] 37. Pomerantz, R. T., Temiakov, D., Anikin, M., Vassylyev, D. G. & McAllister, W. T. A mechanism of nucleotide misincorporation during transcription due to template-strand misalignment. Mol Cell 24, 245-55 (2006).
[0232] 38. Zhang, Z., Schwartz, S., Wagner, L. & Miller, W. A greedy algorithm for aligning DNA sequences. J Comput Bio17, 203-14 (2000).
[0233] 39. Boguski, M. S., Lowe, T. M. & Tolstoshev, C. M. dbEST—database for “expressed sequence tags”. Nat Genet. 4, 332-3 (1993).
[0234] 40. Pruitt, K. D., Tatusova, T. & Maglott, D. R. NCBI reference sequences (RefSeq): a curated non-redundant sequence database of genomes, transcripts and proteins. Nucleic Acids Res 35, D61-5 (2007).
[0235] 41. Dalmasso, C., Broet, P. Procédures d′ estimation du false discovery rate basées sur la distribution des degrés de signification. Journal de la Société Française de Statistiques 146 (2005).
[0236] 42. Bairoch, A. & Apweiler, R. The SWISS-PROT protein sequence data bank and its supplement TrEMBL in 1999. Nucleic Acids Res 27, 49-54 (1999).
[0237] 43. Bamford, S. et al. The COSMIC (Catalogue of Somatic Mutations in Cancer) database and website. Br J Cancer 91, 355-8 (2004).
[0238] 44. Sherry, S. T. et al. dbSNP: the NCBI database of genetic variation. Nucleic Acids Res 29, 308-11 (2001).
[0239] 45. Sharma, S. et al. T cell-derived IL-10 promotes lung cancer growth by suppressing both T cell and APC function. J Immunol 163, 5020-8 (1999).
[0240] 46. Bertram, J. S. & Janik, P. Establishment of a cloned line of Lewis Lung Carcinoma cells adapted to cell culture. Cancer Lett 11, 63-73 (1980).
[0241] 47. Gott, J. M. & Emeson, R. B. Functions and mechanisms of RNA editing. Annu Rev Genet. 34, 499-531 (2000).
[0242] 48. Rogers, K., Gao, G. & Simpson, L. U-specific 3′-5′ exoribonucleases involved in U-deletion RNA editing in trypanosomatid mitochondria. J Biol Chem (2007).
[0243] 49. Lodish, H., Berk, A., Zipursky, L., Matsudaira, P., Baltimore, D., Darnell, J. in Molecular cell biology (ed. Freeman) 404-452 (2000).
[0244] 50. Lamant, L. et al. Gene-expression profiling of systemic anaplastic large-cell lymphoma reveals differences based on ALK status and two distinct morphologic ALK+ subtypes. Blood 109, 2156-64 (2007).
[0245] 51. Chiarle, R. et al. NPM-ALK transgenic mice spontaneously develop T-cell lymphomas and plasma cell tumors. Blood 101, 1919-27 (2003).
[0246] 52. Wormington, M. Zero tolerance for nonsense: nonsense-mediated mRNA decay uses multiple degradation pathways. Mol Cell 12, 536-8 (2003).
[0247] 53. Biemann, K. Sequencing of peptides by tandem mass spectrometry and high-energy collision-induced dissociation. Methods Enzymol 193, 455-79 (1990).
[0248] 54. Glickman, M. H. & Ciechanover, A. The ubiquitin-proteasome proteolytic pathway: destruction for the sake of construction. Physiol Rev 82, 373-428 (2002).

Lengthy table referenced here
US20110097743A1-20110428-T00001
Please refer to the end of the specification for access instructions.

Lengthy table referenced here
US20110097743A1-20110428-T00002
Please refer to the end of the specification for access instructions.

LENGTHY TABLES
The patent application contains a lengthy table section. A copy of the table is available in electronic form from the USPTO web site (http://seqdata.uspto.gov/?pageRequest=docDetail&DocID=US20110097743A1). An electronic copy of the table will also be available from the USPTO upon request and payment of the fee set forth in 37 CFR 1.19(b)(3).

1-37. (canceled)

38. A method for detecting the presence, risk or stage of development of a cancer in a subject, the method comprising contacting in vitro a sample from the subject with a polypeptide comprising the sequence of an aberrant protein domain created by transcription infidelity, wherein the formation of a complex between said polypeptide and an antibody (TIAB) or TCR-bearing cell present in said sample is an indication of the presence, risk or stage of development of a cancer.

39. The method of claim 38, wherein the level of said TIAB or immune cells in said sample is compared to a reference value, and wherein a variation as compared to the reference value is indicative of the presence, risk or stage of development of a cancer.

40. The method of claim 39, wherein said variation as compared to the reference value is 10%, 20%, 30%, 40%, 50% or more.

41. The method of claim 38, wherein the polypeptide comprises a sequence selected from SEQ ID NOs: 1 to 3334 or an epitope-containing fragment thereof.

42. The method of claim 41, wherein the polypeptide comprises the sequence of any one of the 45 PAP polypeptides of table 5.

43. The method of claim 41, wherein an increase in the level of TIAB or immune cells in said sample as compared to the reference level is indicative of the presence, risk or stage of development of a cancer.

44. The method of claim 38, wherein the cancer is a solid tumor or a non-solid tumor selected from colon cancer, lung cancer, breast cancer, ovarian cancer, uterus cancer, head and neck cancer or melanoma.

45. The method of claim 38, wherein the cancer is a lung cancer and the polypeptide comprises a sequence selected from SEQ ID NO: 1, 2, 4, 6, 7, 1413, 581, 1457, 1769, 1270, 1276, 1396, 80, 1810, 1864, 847, 2119 or 1451 or an epitope-containing fragment thereof, selected from PAP 1, 2, 4, 6, 7, 24, 25, 28, 29, 44, 48, 66, 70, 68, 69, 74, 94, 82 as represented in Table 5.

46. The method of claim 38, wherein the contacting step comprises contacting the sample simultaneously with several polypeptides comprising the sequence of a distinct aberrant protein domain created by transcription infidelity.

47. The method of claim 38, wherein the polypeptide is immobilized on a support.

48. A method of assessing the physiological status of a subject, the method comprising a step of measuring the presence or level of antibodies specific for aberrant protein domains created by transcription infidelity (TIAB) or of TCR-bearing immune cells that bind to such domains in a sample from the subject, wherein a modified level of said TIAB or immune cells in said sample as compared to a reference value is an indication of a physiological disorder.

49. A method of determining the efficacy of a treatment of a cancer, the method comprising (i) determining the level of at least one polypeptide comprising the sequence of an aberrant protein domain created by transcription infidelity or the level of TIAB or corresponding TCR-bearing cells, in a sample from the subject and (ii) comparing said level to the level in a sample from said subject taken prior to or at an earlier stage of the treatment.

50. A method of monitoring the progression or the extension of a cancer in a subject, said method comprising (i) contacting a sample obtained from said subject with at least one polypeptide comprising the sequence of an aberrant protein domain created by transcription infidelity, (ii) determining the level of TIAB or corresponding TCR-bearing cells in said sample and (iii) comparing said level to reference value, a variation is indicative of the progression or the extension of the cancer.

51. A method of determining whether an individual is making a polypeptide comprising a sequence selected from the group consisting of SEQ ID NOs: 1-3334, comprising contacting a sample obtained from said individual with an agent indicative of the presence of said polypeptide and determining whether said agent binds to said sample.

52. The method of claim 51, wherein said agent is a polypeptide which binds to an antibody which specifically binds to a polypeptide comprising a sequence selected from the group consisting of SEQ ID NOs: 1-3334.

53. The method of claim 51, wherein said agent is a polypeptide which binds to an immune cell comprising a TCR specific for a polypeptide comprising a sequence selected from the group consisting of SEQ ID NOs: 1-3334.

54. The method of claim 51, wherein said agent is an antibody or portion thereof which specifically binds to a polypeptide comprising a sequence selected from the group consisting of SEQ ID NOs: 1-3334.

55. The method of claim 51, wherein said agent is an immune cell comprising a TCR specific for a polypeptide comprising a sequence selected from the group consisting of SEQ ID NOs: 1-3334.

56. A composition of matter comprising:
a) a polypeptide comprising a sequence selected from SEQ ID NOs: 1 to 3334 or an epitope-containing fragment thereof;
b) an isolated polynucleotide encoding a polypeptide of a);
c) a cloning or expression vector comprising a polynucleotide of c);
d) an isolated cell transformed or transfected with a vector of c);
e) an isolated antibody or portion of an antibody which specifically binds to a polypeptide selected from the group consisting of SEQ ID NOs: 1-3334; or
f) a solid support comprising a molecule selected from: a) at least one antibody or portion of an antibody which specifically binds to a polypeptide selected from the group consisting of SEQ ID NOs: 1-3334; or b) at least one polypeptide comprising a sequence selected from SEQ ID NOs 1 to 3334 or an epitope-containing fragment thereof.

The application's sequence listing, which the Patent Office published only in electronic form, follows.

SEQUENCE LISTING (3334 sequences)

SEQ ID NO: 1 - protein, 30 aa, Homo Sapiens
WRRWAAPWFWSSLQLGGLVFRGPGPRARSR

SEQ ID NO: 2 - protein, 35 aa, Homo Sapiens
NLNSFHLFKKRCYHLIVFKEKWHSLLGEVLALVKE

SEQ ID NO: 3 - protein, 25 aa, Homo Sapiens
GWMGCLSAVPSTRRTELTSPSGVVC

SEQ ID NO: 4 - protein, 18 aa, Homo Sapiens
RKALTKSGWPSRPRGCWT

SEQ ID NO: 5 - protein, 13 aa, Homo Sapiens
LPLLPISTSPGRS

SEQ ID NO: 6 - protein, 30 aa, Homo Sapiens
SLTWLATLKSSCQSRRSMSSMAVLMLATSW

SEQ ID NO: 7 - protein, 19 aa, Homo Sapiens
LCFKRYELRLPAKRKRKRN

SEQ ID NO: 8 - protein, 12 aa, Homo Sapiens
ARSLKGVSWPEL

SEQ ID NO: 9 - protein, 30 aa, Homo Sapiens
FKISNDHPNEDTVNSLYPDFLLSACRKHHH

SEQ ID NO: 10 - protein, 27 aa, Homo Sapiens
LILPLQAQWKHLDVPLQKKTCVRLSLM

SEQ ID NO: 11 - protein, 37 aa, Homo Sapiens
STSESEWPQVEPRPKPTTGHAHRPASLPPPSHPLLLG

SEQ ID NO: 12 - protein, 20 aa, Homo Sapiens
PMIRETEPLQAMSPLRTLNG

SEQ ID NO: 13 - protein, 16 aa, Homo Sapiens
LPKLILMAMDTSASMS

SEQ ID NO: 14 - protein, 21 aa, Homo Sapiens
LPKEMVSLSFMKTLSVNLNTG

SEQ ID NO: 15 - protein, 16 aa, Homo Sapiens
FGLRTRLEWQAKIPSG

SEQ ID NO: 16 - protein, 6 aa, Homo Sapiens
CQSLPE

SEQ ID NO: 17 - protein, 71 aa, Homo Sapiens
LWRSSSGRPSSPAHCMRTATSWAPLLPGPASPANKWKSPSGRGPSMCPTAPQERGTIRSGLSSAATHWPPR

SEQ ID NO: 18 - protein, 5 aa, Homo Sapiens
KRSRI

SEQ ID NO: 19 - protein, 66 aa, Homo Sapiens
ESTATRWHLHPWLLHSGTELPKFFCSPHMQHLWTCGVLAVSLQRCFVESLSSVETLKPTSWAKSLT

SEQ ID NO: 20 - protein, 62 aa, Homo Sapiens
TRWHLHPWLLHSGTELPKFFCSPHMQHLWTCGVLAVSLQRCFVESLSSVETLKPTSWAKSLT

SEQ ID NO: 21 - protein, 15 aa, Homo Sapiens
GLRTRLEWQAKIPSG

SEQ ID NO: 22 - protein, 3 aa, Homo Sapiens
LAS

SEQ ID NO: 23 - protein, 34 aa, Homo Sapiens
RQPSTAWSICTCRPPTPTSLWASISTAMMWLWKA

SEQ ID NO: 24 - protein, 31 aa, Homo Sapiens
STAWSICTCRPPTPTSLWASISTAMMWLWKA

SEQ ID NO: 25 - protein, 25 aa, Homo Sapiens
CTCRPPTPTSLWASISTAMMWLWKA

SEQ ID NO: 26 - skipped

SEQ ID NO: 27 - protein, 17 aa, Homo Sapiens
TSLWASISTAMMWLWKA

SEQ ID NO: 28 - protein, 7 aa, Homo Sapiens
MMWLWKA

SEQ ID NO: 29 - protein, 16 aa, Homo Sapiens
SSANWPRRSARATSVS

SEQ ID NO: 30 - protein, 12 aa, Homo Sapiens
WPRRSARATSVS

SEQ ID NO: 31 - protein, 22 aa, Homo Sapiens
AALSSRTSRSQLKMSGVKPQTP

SEQ ID NO: 32 - protein, 21 aa, Homo Sapiens
ALSSRTSRSQLKMSGVKPQTP

SEQ ID NO: 33 - protein, 11 aa, Homo Sapiens
VKMSGVKPQTP

SEQ ID NO: 34 - protein, 2 aa, Homo Sapiens
EP

SEQ ID NO: 35 - skipped

SEQ ID NO: 36 - protein, 6 aa, Homo Sapiens
WPWRKS

SEQ ID NO: 37 - protein, 4 aa, Homo Sapiens
WRKS

SEQ ID NO: 38 - protein, 24 aa, Homo Sapiens
FWIFMPWVLPARTPISVTSWRLTS

SEQ ID NO: 39 - protein, 23 aa, Homo Sapiens
WIFMPWVLPARTPISVTSWRLTS

SEQ ID NO: 40 - protein, 18 aa, Homo Sapiens
WVLPARTPISVTSWRLTS

SEQ ID NO: 41 - protein, 13 aa, Homo Sapiens
RTPISVTSWRLTS

SEQ ID NO: 42 - skipped

SEQ ID NO: 43 - protein, 7 aa, Homo Sapiens
SRRWVTT

SEQ ID NO: 44 - protein, 16 aa, Homo Sapiens
PMASMLFTSSSTKAPR

SEQ ID NO: 45 - protein, 1 aa, Homo Sapiens
C

SEQ ID NO: 46 - protein, 9 aa, Homo Sapiens
FELTLPIQR

SEQ ID NO: 47 - protein, 9 aa, Homo Sapiens
WWVCLLLWT

SEQ ID NO: 48 - protein, 33 aa, Homo Sapiens
ASMQALGALVPGSPCPAPPASGAAWGPGAWPPG

SEQ ID NO: 49 - protein, 5 aa, Homo Sapiens
LTWTE

SEQ ID NO: 50 - protein, 2 aa, Homo Sapiens
SS

SEQ ID NO: 51 - protein, 5 aa, Homo Sapiens
TTKRK

SEQ ID NO: 52 - protein, 4 aa, Homo Sapiens
TKRK

SEQ ID NO: 53 - protein, 10 aa, Homo Sapiens
LSRKDSALLV

SEQ ID NO: 54 - protein, 8 aa, Homo Sapiens
RMGSNTTG

SEQ ID NO: 55 - protein, 11 aa, Homo Sapiens
LMVCPCLTSTP

SEQ ID NO: 56 - skipped

SEQ ID NO: 57 - protein, 11 aa, Homo Sapiens
LALLTEPTAPW

SEQ ID NO: 58 - protein, 2 aa, Homo Sapiens
PW

SEQ ID NO: 59 - protein, 7 aa, Homo Sapiens
HRRLVGF

SEQ ID NO: 60 - skipped

SEQ ID NO: 61 - protein, 33 aa, Homo Sapiens
MVVEWLLPSLRCSTTWRLALLCLMKREPRLSKT

SEQ ID NO: 62 - protein, 32 aa, Homo Sapiens
LFIVIASALRTAASRPTTRGGGTGPCSRWTGC

SEQ ID NO: 63 - protein, 16 aa, Homo Sapiens
TTRGGGTGPCSRWTGC

SEQ ID NO: 64 - protein, 81 aa, Homo Sapiens
TCVLCRRLLALIGSTSPTASSGTKGKSVANQQSSATSAVLDMKRSLGRRAVQQPYHSQTFTRPWESLDPPPLSCTRTARRS

SEQ ID NO: 65 - skipped

SEQ ID NO: 66 - protein, 3 aa, Homo Sapiens
QKP

SEQ ID NO: 67 - protein, 23 aa, Homo Sapiens
RCRPTPRWFVLPLLPISTSPGRS

SEQ ID NO: 68 - protein, 19 aa, Homo Sapiens
TPRWFVLPLLPISTSPGRS

SEQ ID NO: 69 - protein, 14 aa, Homo Sapiens
VLPLLPISTSPGRS

SEQ ID NO: 70 - protein, 10 aa, Homo Sapiens
MLWLRRTATK

SEQ ID NO: 71 - protein, 6 aa, Homo Sapiens
LGSQMS

SEQ ID NO: 72 - protein, 8 aa, Homo Sapiens
MLWQRDSE

SEQ ID NO: 73 - protein, 10 aa, Homo Sapiens
SSRQRSSQIT

SEQ ID NO: 74 - protein, 28 aa, Homo Sapiens
MSLCGPLVLARLQHPNRPRKYTRSSEDG

SEQ ID NO: 75 - protein, 4 aa, Homo Sapiens
ETGR

SEQ ID NO: 76 - protein, 16 aa, Homo Sapiens
EHPNRPRKYTRSSEDG

SEQ ID NO: 77 - protein, 15 aa, Homo Sapiens
NPNRPRKYTRSSEDG

SEQ ID NO: 78 - protein, 41 aa, Homo Sapiens
SLWVVLPSSPNSWTSSMPNNEPHPSSLPFLPSQGLSSPEAQ

SEQ ID NO: 79 - protein, 11 aa, Homo Sapiens
WKLLRFFRRRA

SEQ ID NO: 80 - protein, 52 aa, Homo Sapiens
LAPHLLCCRGQQRKTMWTCHCLVPLCLAQGSRLKGPQVDLETLRVENGGRPA

SEQ ID NO: 81 - protein, 2 aa, Homo Sapiens
CA

SEQ ID NO: 82 - protein, 7 aa, Homo Sapiens
CAGCWMS

SEQ ID NO: 83 - protein, 17 aa, Homo Sapiens
EPTWRCRLRTSRRSWPT

SEQ ID NO: 84 - protein, 1 aa, Homo Sapiens
T

SEQ ID NO: 85 - protein, 37 aa, Homo Sapiens
LEIIQQAVPVQVLTLILYPENTVGQRMKRGMLETWAM

SEQ ID NO: 86 - protein, 91 aa, Homo Sapiens
SSSPGLRCVATMLPGTLRSSWWALTVCPYAGTAAASRPLTSSLTSKPCCLKGPAVPRAPLLPRLLGSCSAAVSGGFSSMRVFPLNLRGRNT

SEQ ID NO: 87 - protein, 6 aa, Homo Sapiens
VVMYRT

SEQ ID NO: 88 - protein, 11 aa, Homo Sapiens
LVQYLKPRKMN

SEQ ID NO: 89 - protein, 1 aa, Homo Sapiens
V

SEQ ID NO: 90 - skipped

SEQ ID NO: 91 - protein, 19 aa, Homo Sapiens
WMVSMSLKKELFSRLMNKI

SEQ ID NO: 92 - protein, 1 aa, Homo Sapiens
V

SEQ ID NO: 93 - protein, 13 aa, Homo Sapiens
PCMKQEKGERGQT

SEQ ID NO: 94 - protein, 6 aa, Homo Sapiens
LLGSSP

SEQ ID NO: 95 - protein, 56 aa, Homo Sapiens
FLMPWANVEVLELRSSWSQETIQSQLKLLPKVWASSQKAMRPWKTLLPASTSQSAR

SEQ ID NO: 96 - protein, 5 aa, Homo Sapiens
MPRPA

SEQ ID NO: 97 - protein, 30 aa, Homo Sapiens
RPAWCTTPGCLKMERNLIPPGTETSPLSLC

SEQ ID NO: 98 - protein, 22 aa, Homo Sapiens
EARPSLWETRSPSLTTTCWTCC

SEQ ID NO: 99 - protein, 29 aa, Homo Sapiens
WMRSPCSQHMWGASAPGPSSRPSWPPLST

SEQ ID NO: 100 - protein, 4 aa, Homo Sapiens
PLST

SEQ ID NO: 101 - protein, 16 aa, Homo Sapiens
CACCWQIRARAGRRRW

SEQ ID NO: 102 - protein, 42 aa, Homo Sapiens
KQQQCTRCQSMHGALVFRSLLMEESKMWVILRKPWPLGPPQS

SEQ ID NO: 103 - protein, 19 aa, Homo Sapiens
MASSTTTVHLNSRPMKFGK

SEQ ID NO: 104 - protein, 47 aa, Homo Sapiens
LRPRPGMVSAVSQSQTQAGWGAAWWASSPPGTLIFSKRRNMTVSWKR

SEQ ID NO: 105 - protein, 14 aa, Homo Sapiens
MKFCSAARRESCPL

SEQ ID NO: 106 - protein, 13 aa, Homo Sapiens
WTLPREIPSSRSI

SEQ ID NO: 107 - protein, 8 aa, Homo Sapiens
EIPSSRSI

SEQ ID NO: 108 - protein, 110 aa, Homo Sapiens
ASATGARGAQRRVAPSAPTGTAARWPRSPTAGGGQTPSGWAWGTTTTAETQIETQSPGATSLRRGSTAQSSAAPLPALRETVTATLGMGQPTVARTASPSRVPPASRGIP

SEQ ID NO: 109 - protein, 5 aa, Homo Sapiens
MEMKM

SEQ ID NO: 110 - protein, 17 aa, Homo Sapiens
LVSSERLFQKQWIILWP

SEQ ID NO: 111 - protein, 3 aa, Homo Sapiens
LWP

SEQ ID NO: 112 - protein, 10 aa, Homo Sapiens
LATKTANSIV

SEQ ID NO: 113 - protein, 26 aa, Homo Sapiens
AETSPGEMAQEERASTVSASPMRTSN

SEQ ID NO: 114 - protein, 20 aa, Homo Sapiens
EMAQEERASTVSASPMRTSN

SEQ ID NO: 115 - protein, 4 aa, Homo Sapiens
LAKF

SEQ ID NO: 116 - protein, 4 aa, Homo Sapiens
GINP

SEQ ID NO: 117 - protein, 64 aa, Homo Sapiens
MWATWKPLEASGPSRLSLLSTSVMNARGVSIRIGINLRRRPLPSTARNGRMRMARSSWRRTSAA

SEQ ID NO: 118 - protein, 54 aa, Homo Sapiens
SGPSRLSLLSTSVMNARGVSIRIGINLRRRPLPSTARNGRMRMARSSWRRTSAA

SEQ ID NO: 119 - protein, 51 aa, Homo Sapiens
SRLSLLSTSVMNARGVSIRIGINLRRRPLPSTARNGRMRMARSSWRRTSAA

SEQ ID NO: 120 - protein, 35 aa, Homo Sapiens
SIRIGINLRRRPLPSTARNGRMRMARSSWRRTSAA

SEQ ID NO: 121 - protein, 31 aa, Homo Sapiens
GINLRRRPLPSTARNGRMRMARSSWRRTSAA

SEQ ID NO: 122 - protein, 23 aa, Homo Sapiens
LPSTARNGRMRMARSSWRRTSAA

SEQ ID NO: 123 - protein, 22 aa, Homo Sapiens
KSSVSLPTPRCACFLCARRRPT

SEQ ID NO: 124 - protein, 17 aa, Homo Sapiens
MPTPRCACFLCARRRPT

SEQ ID NO: 125 - protein, 15 aa, Homo Sapiens
TPRCACFLCARRRPT

SEQ ID NO: 126 - protein, 13 aa, Homo Sapiens
RCACFLCARRRPT

SEQ ID NO: 127 - protein, 9 aa, Homo Sapiens
FLCARRRPT

SEQ ID NO: 128 - protein, 5 aa, Homo Sapiens
RRRPT

SEQ ID NO: 129 - protein, 1 aa, Homo Sapiens
T

SEQ ID NO: 130 - skipped

SEQ ID NO: 131 - protein, 15 aa, Homo Sapiens
RSWTGPARGLSSRYL

SEQ ID NO: 132 - protein, 10 aa, Homo Sapiens
PARGLSSRYL

SEQ ID NO: 133 - protein, 9 aa, Homo Sapiens
ARGLSSRYL

SEQ ID NO: 134 - protein, 8 aa, Homo Sapiens
RGLSSRYL

SEQ ID NO: 135 - protein, 5 aa, Homo Sapiens
SSRYL

SEQ ID NO: 136 - protein, 1 aa, Homo Sapiens
L

SEQ ID NO: 137 - protein, 5 aa, Homo Sapiens
LGRMR

SEQ ID NO: 138 - protein, 3 aa, Homo Sapiens
RMR

SEQ ID NO: 139 - protein, 2 aa, Homo Sapiens
SG

SEQ ID NO: 140 - protein, 38 aa, Homo Sapiens
RAKATKGSPVVGTPRSCPARPTEACARWPVLGHGILLV

SEQ ID NO: 141 - protein, 37 aa, Homo Sapiens
AKATKGSPVVGTPRSCPARPTEACARWPVLGHGILLV

SEQ ID NO: 142 - protein, 31 aa, Homo Sapiens
SPVVGTPRSCPARPTEACARWPVLGHGILLV

SEQ ID NO: 143 - protein, 27 aa, Homo Sapiens
GTPRSCPARPTEACARWPVLGHGILLV

SEQ ID NO: 144 - protein, 26 aa, Homo Sapiens
TPRSCPARPTEACARWPVLGHGILLV

SEQ ID NO: 145 - protein, 14 aa, Homo Sapiens
CARWPVLGHGILLV

SEQ ID NO: 146 - protein, 8 aa, Homo Sapiens
MGHGILLV

SEQ ID NO: 147 - protein, 25 aa, Homo Sapiens
ATITALRSTRRFIRLARATLSRTAS

SEQ ID NO: 148 - protein, 20 aa, Homo Sapiens
LRSTRRFIRLARATLSRTAS

SEQ ID NO: 149 - protein, 16 aa, Homo Sapiens
RRFIRLARATLSRTAS

SEQ ID NO: 150 - protein, 8 aa, Homo Sapiens
ATLSRTAS

SEQ ID NO: 151 - skipped

SEQ ID NO: 152 - protein, 48 aa, Homo Sapiens
VLRSRRSLWWEKRQQLPRNQPLKRSLQRRNLLQRRRSLLHKLLNLIIP

SEQ ID NO: 153 - protein, 13 aa, Homo Sapiens
CLLYSRLLFDQIL

SEQ ID NO: 154 - protein, 18 aa, Homo Sapiens
LFTPTCAKTTDSPMLSVN

SEQ ID NO: 155 - protein, 48 aa, Homo Sapiens
GVLAELWLEFPEFEVVGLTALARVLLETCVVEAECLHQPKPGAVGIVE

SEQ ID NO: 156 - protein, 25 aa, Homo Sapiens
VLLETCVVEAECLHQPKPGAVGIVE

SEQ ID NO: 157 - protein, 23 aa, Homo Sapiens
LETCVVEAECLHQPKPGAVGIVE

SEQ ID NO: 158 - protein, 13 aa, Homo Sapiens
LHQPKPGAVGIVE

SEQ ID NO: 159 - protein, 7 aa, Homo Sapiens
GAVGIVE

SEQ ID NO: 160 - protein, 34 aa, Homo Sapiens
KNDTPSVLPWLPQPYQHWSCLKVIVLRKFLNFLW

SEQ ID NO: 161 - protein, 24 aa, Homo Sapiens
VPQPYQHWSCLKVIVLRKFLNFLW

SEQ ID NO: 162 - protein, 22 aa, Homo Sapiens
QPYQHWSCLKVIVLRKFLNFLW

SEQ ID NO: 163 - protein, 9 aa, Homo Sapiens
MRKFLNFLW

SEQ ID NO: 164 - protein, 1 aa, Homo Sapiens
W

SEQ ID NO: 165 - protein, 20 aa, Homo Sapiens
CSLRNLKPGMISKRSMPLSE

SEQ ID NO: 166 - skipped

SEQ ID NO: 167 - protein, 7 aa, Homo Sapiens
RSMPLSE

SEQ ID NO: 168 - protein, 1 aa, Homo Sapiens
E

SEQ ID NO: 169 - protein, 2 aa, Homo Sapiens
AK

SEQ ID NO: 170 - protein, 2 aa, Homo Sapiens
AK

SEQ ID NO: 171 - skipped

SEQ ID NO: 172 - protein, 31 aa, Homo Sapiens
VSSAGARASSIMRIMVSSRPSETSLELLCLM

SEQ ID NO: 173 - protein, 26 aa, Homo Sapiens
ARASSIMRIMVSSRPSETSLELLCLM

SEQ ID NO: 174 - protein, 25 aa, Homo Sapiens
RASSIMRIMVSSRPSETSLELLCLM

SEQ ID NO: 175 - protein, 20 aa, Homo Sapiens
MRIMVSSRPSETSLELLCLM

SEQ ID NO: 176 - protein, 17 aa, Homo Sapiens
MVSSRPSETSLELLCLM

SEQ ID NO: 177 - protein, 11 aa, Homo Sapiens
SETSLELLCLM

SEQ ID NO: 178 - protein, 7 aa, Homo Sapiens
LELLCLM

SEQ ID NO: 179 - skipped

SEQ ID NO: 180 - protein, 8 aa, Homo Sapiens
GLKVLSGS

SEQ ID NO: 181 - protein, 21 aa, Homo Sapiens
CTALGVKPLPSRVTTIFPCTR

SEQ ID NO: 182 - protein, 7 aa, Homo Sapiens
VRLLMPV

SEQ ID NO: 183 - protein, 25 aa, Homo Sapiens
VLACCWPAGFSIGLAWTRSMKAKWR

SEQ ID NO: 184 - protein, 18 aa, Homo Sapiens
AGFSIGLAWTRSMKAKWR

SEQ ID NO: 185 - protein, 12 aa, Homo Sapiens
LAWTRSMKAKWR

SEQ ID NO: 186 - protein, 3 aa, Homo Sapiens
LVP

SEQ ID NO: 187 - protein, 30 aa, Homo Sapiens
LVMILKARNLMQKYIGSTSWARMLQITCAT

SEQ ID NO: 188 - protein, 15 aa, Homo Sapiens
LLKLLRIRPTLRDTK

SEQ ID NO: 189 - protein, 72 aa, Homo Sapiens
MAGIPDLPCIPERPCTRGSTQPLNPRLKRKRRRRFSQLLQNQLVVTRTAVPGWLNFAKCLDIILLKMCLESC

SEQ ID NO: 190 - protein, 6 aa, Homo Sapiens
NPSVST

SEQ ID NO: 191 - protein, 1 aa, Homo Sapiens
F

SEQ ID NO: 192 - protein, 3 aa, Homo Sapiens
YYL

SEQ ID NO: 193 - protein, 64 aa, Homo Sapiens
LPKRCFERQGGSLSMKKQSTITRNIGRCTELKFEWRGWQEKLATSMYLQNPNWRLSSESEVSME

SEQ ID NO: 194 - protein, 10 aa, Homo Sapiens
LSSESEVSME

SEQ ID NO: 195 - protein, 14 aa, Homo Sapiens
CSFFAFVKSSMEPL

SEQ ID NO: 196 - protein, 1 aa, Homo Sapiens
L

SEQ ID NO: 197 - protein, 1 aa, Homo Sapiens
M

SEQ ID NO: 198 - protein, 7 aa, Homo Sapiens
MHGGTPI

SEQ ID NO: 199 - protein, 2 aa, Homo Sapiens
ML

SEQ ID NO: 200 - protein, 1 aa, Homo Sapiens
V

SEQ ID NO: 201 - protein, 15 aa, Homo Sapiens
MLDLLVNTASSAWRI

SEQ ID NO: 202 - protein, 14 aa, Homo Sapiens
VDLLVNTASSAWRI

SEQ ID NO: 203 - protein, 6 aa, Homo Sapiens
SSAWRI

SEQ ID NO: 204 - skipped

SEQ ID NO: 205 - protein, 22 aa, Homo Sapiens
ENASKRQITSCGPSNCLLHEVE

SEQ ID NO: 206 - protein, 15 aa, Homo Sapiens
ITSCGPSNCLLHEVE

SEQ ID NO: 207 - protein, 9 aa, Homo Sapiens
SNCLLHEVE

SEQ ID NO: 208 - protein, 7 aa, Homo Sapiens
CLLHEVE

SEQ ID NO: 209 - protein, 3 aa, Homo Sapiens
PIL

SEQ ID NO: 210 - protein, 2 aa, Homo Sapiens
IL

SEQ ID NO: 211 - protein, 1 aa, Homo Sapiens
L

SEQ ID NO: 212 - protein, 12 aa, Homo Sapiens
TGRTRSTGLLEE

SEQ ID NO: 213 - protein, 3 aa, Homo Sapiens
LEE

SEQ ID NO: 214 - protein, 22 aa, Homo Sapiens
TKVSTMIIFLSWLVNKQYLLSN

SEQ ID NO: 215 - protein, 23 aa, Homo Sapiens
LRKGLRILALDRTSSPKETSPAL

SEQ ID NO: 216 - protein, 16 aa, Homo Sapiens
LALDRTSSPKETSPAL

SEQ ID NO: 217 - protein, 14 aa, Homo Sapiens
MDRTSSPKETSPAL

SEQ ID NO: 218 - protein, 1 aa, Homo Sapiens
L

SEQ ID NO: 219 - protein, 56 aa, Homo Sapiens
TSTDQRQSKRRSRDCWPGPRRRLLAKGTSQRRDHLSFEQELTPSPPWWRTRKLSWW

SEQ ID NO: 220 - protein, 41 aa, Homo Sapiens
WPGPRRRLLAKGTSQRRDHLSFEQELTPSPPWWRTRKLSWW

SEQ ID NO: 221 - protein, 36 aa, Homo Sapiens
MHTTWIPSSWLSSCLPCVVKWGSLTALSRERQDWDV

SEQ ID NO: 222 - protein, 20 aa, Homo Sapiens
CVVKWGSLTALSRERQDWDV

SEQ ID NO: 223 - protein, 13 aa, Homo Sapiens
LTALSRERQDWDV

SEQ ID NO: 224 - protein, 3 aa, Homo Sapiens
SHR

SEQ ID NO: 225 - protein, 72 aa, Homo Sapiens
WLSWWKLSGPITMTDTMRSAVTGVAMSWVLSLWLVSPSSKRQRLKNLPLNWVKCTLLSFLYIKIIEIIQIFL

SEQ ID NO: 226 - protein, 71 aa, Homo Sapiens
VSWWKLSGPITMTDTMRSAVTGVAMSWVLSLWLVSPSSKRQRLKNLPLNWVKCTLLSFLYIKIIEIIQIFL

SEQ ID NO: 227 - protein, 60 aa, Homo Sapiens
MTDTMRSAVTGVAMSWVLSLWLVSPSSKRQRLKNLPLNWVKCTLLSFLYIKIIEIIQIFL

SEQ ID NO: 228 - protein, 52 aa, Homo Sapiens
VTGVAMSWVLSLWLVSPSSKRQRLKNLPLNWVKCTLLSFLYIKIIEIIQIFL

SEQ ID NO: 229 - protein, 47 aa, Homo Sapiens
MSWVLSLWLVSPSSKRQRLKNLPLNWVKCTLLSFLYIKIIEIIQIFL

SEQ ID NO: 230 - protein, 43 aa, Homo Sapiens
LSLWLVSPSSKRQRLKNLPLNWVKCTLLSFLYIKIIEIIQIFL

SEQ ID NO: 231 - protein, 39 aa, Homo Sapiens
VVSPSSKRQRLKNLPLNWVKCTLLSFLYIKIIEIIQIFL

SEQ ID NO: 232 - protein, 31 aa, Homo Sapiens
QRLKNLPLNWVKCTLLSFLYIKIIEIIQIFL

SEQ ID NO: 233 - protein, 30 aa, Homo Sapiens
RLKNLPLNWVKCTLLSFLYIKIIEIIQIFL

SEQ ID NO: 234 - protein, 108 aa, Homo Sapiens
TSRASSRTSSTTRAAARPSPRWSSGIRIGLRSGRSCSLPPRAFTRASLCIAARRPSSTLAMCSLWAPCLRVQSCAAWRRSLETVASWPGHQGTMPPLSPTTLRPRRPV

SEQ ID NO: 235 - protein, 92 aa, Homo Sapiens
RPSPRWSSGIRIGLRSGRSCSLPPRAFTRASLCIAARRPSSTLAMCSLWAPCLRVQSCAAWRRSLETVASWPGHQGTMPPLSPTTLRPRRPV

SEQ ID NO: 236 - protein, 61 aa, Homo Sapiens
LCIAARRPSSTLAMCSLWAPCLRVQSCAAWRRSLETVASWPGHQGTMPPLSPTTLRPRRPV

SEQ ID NO: 237 - protein, 58 aa, Homo Sapiens
AARRPSSTLAMCSLWAPCLRVQSCAAWRRSLETVASWPGHQGTMPPLSPTTLRPRRPV

SEQ ID NO: 238 - protein, 20 aa, Homo Sapiens
GHQGTMPPLSPTTLRPRRPV

SEQ ID NO: 239 - protein, 7 aa, Homo Sapiens
LRPRRPV

SEQ ID NO: 240 - protein, 28 aa, Homo Sapiens
PAPRRLSPQPTELWLVWWLEVAELTNPS

SEQ ID NO: 241 - protein, 6 aa, Homo Sapiens
ELTNPS

SEQ ID NO: 242 - protein, 1 aa, Homo Sapiens
S

SEQ ID NO: 243 - protein, 20 aa, Homo Sapiens
GRTTNIRQRGTAGHEYGVWP

SEQ ID NO: 244 - protein, 14 aa, Homo Sapiens
RQRGTAGHEYGVWP

SEQ ID NO: 245 - protein, 8 aa, Homo Sapiens
GHEYGVWP

SEQ ID NO: 246 - protein, 7 aa, Homo Sapiens
HEYGVWP

SEQ ID NO: 247 - skipped

SEQ ID NO: 248 - protein, 69 aa, Homo Sapiens [sequence omitted]

SEQ ID NO: 249 - protein, 68 aa, Homo Sapiens
LEVATTSTSASPPPSAEMPLLAAKWVSLLPAGLDVSGEPRLCRRKRTSAEGLNKVCVYAKKKKKKKKK

SEQ ID NO: 250 - protein, 64 aa, Homo Sapiens
TTSTSASPPPSAEMPLLAAKWVSLLPAGLDVSGEPRLCRRKRTSAEGLNKVCVYAKKKKKKKKK

SEQ ID NO: 251 - protein, 52 aa, Homo Sapiens
EMPLLAAKWVSLLPAGLDVSGEPRLCRRKRTSAEGLNKVCVYAKKKKKKKKK

SEQ ID NO: 252 - protein, 38 aa, Homo Sapiens
AGLDVSGEPRLCRRKRTSAEGLNKVCVYAKKKKKKKKK

SEQ ID NO: 253 - protein, 37 aa, Homo Sapiens
GLDVSGEPRLCRRKRTSAEGLNKVCVYAKKKKKKKKK

SEQ ID NO: 254 - protein, 27 aa, Homo Sapiens
LASGEMKRLLSTAQFEGPRQKKSWRRV

SEQ ID NO: 255 - protein, 86 aa, Homo Sapiens
LGSRNTSIWVSNMTQALVSTAWTSMWCWVGQVSASQTRSAGQAALGPNTESAKRRPCAGSSRSMMGSSFLANKFPFLSKRAIKSFQ

SEQ ID NO: 256 - protein, 70 aa, Homo Sapiens
MVSTAWTSMWCWVGQVSASQTRSAGQAALGPNTESAKRRPCAGSSRSMMGSSFLANKFPFLSKRAIKSFQ

SEQ ID NO: 257 - protein, 42 aa, Homo Sapiens
MGPNTESAKRRPCAGSSRSMMGSSFLANKFPFLSKRAIKSFQ

SEQ ID NO: 258 - protein, 5 aa, Homo Sapiens
RVETD

SEQ ID NO: 259 - protein, 25 aa, Homo Sapiens
RSAPWVCLQKKLVMTLPRQRVTGRA

SEQ ID NO: 260 - protein, 21 aa, Homo Sapiens
WVCLQKKLVMTLPRQRVTGRA

SEQ ID NO: 261 - protein, 34 aa, Homo Sapiens
ILMTSSMTSTVVLWNAQPVKHKGKHFNKGSFDNW

SEQ ID NO: 262 - protein, 93 aa, Homo Sapiens
RGSTSRPVRSADVRPGKPRRAASPRAPRRVPSGPSCAAPRFGTTRRCAPAAASAWRSSGWPAFTRRWPGPSAFLWIRGGGTSPRSPCRPTCSG

SEQ ID NO: 263 - protein, 71 aa, Homo Sapiens
SPRAPRRVPSGPSCAAPRFGTTRRCAPAAASAWRSSGWPAFTRRWPGPSAFLWIRGGGTSPRSPCRPTCSG

SEQ ID NO: 264 - protein, 54 aa, Homo Sapiens
RFGTTRRCAPAAASAWRSSGWPAFTRRWPGPSAFLWIRGGGTSPRSPCRPTCSG

SEQ ID NO: 265 - protein, 43 aa, Homo Sapiens
AASAWRSSGWPAFTRRWPGPSAFLWIRGGGTSPRSPCRPTCSG

SEQ ID NO: 266 - protein, 41 aa, Homo Sapiens
SAWRSSGWPAFTRRWPGPSAFLWIRGGGTSPRSPCRPTCSG

SEQ ID NO: 267 - protein, 23 aa, Homo Sapiens
SAFLWIRGGGTSPRSPCRPTCSG

SEQ ID NO: 268 - skipped

SEQ ID NO: 269 - protein, 22 aa, Homo Sapiens
PNSSSSPGSPRPPRRETVLLKN

SEQ ID NO: 270 - protein, 9 aa, Homo Sapiens
RRETVLLKN

SEQ ID NO: 271 - protein, 2 aa, Homo Sapiens
PS

SEQ ID NO: 272 - protein, 1 aa, Homo Sapiens
S

SEQ ID NO: 273 - protein, 104 aa, Homo Sapiens
RSCPSGTSIRRRKLESSLRKRRISKPSLVSVWPVPTPGSSAYGQKEPRKPQNRMLKRKNKALLGTWNQSAVMLGLHVVCFVGTTGPGMGLHCCDFLLPGDLGLS

SEQ ID NO: 274 - protein, 95 aa, Homo Sapiens
RRRKLESSLRKRRISKPSLVSVWPVPTPGSSAYGQKEPRKPQNRMLKRKNKALLGTWNQSAVMLGLHVVCFVGTTGPGMGLHCCDFLLPGDLGLS

SEQ ID NO: 275 - protein, 81 aa, Homo Sapiens
SKPSLVSVWPVPTPGSSAYGQKEPRKPQNRMLKRKNKALLGTWNQSAVMLGLHVVCFVGTTGPGMGLHCCDFLLPGDLGLS

SEQ ID NO: 276 - protein, 71 aa, Homo Sapiens
VPTPGSSAYGQKEPRKPQNRMLKRKNKALLGTWNQSAVMLGLHVVCFVGTTGPGMGLHCCDFLLPGDLGLS

SEQ ID NO: 277 - protein, 69 aa, Homo Sapiens
TPGSSAYGQKEPRKPQNRMLKRKNKALLGTWNQSAVMLGLHVVCFVGTTGPGMGLHCCDFLLPGDLGLS

SEQ ID NO: 278 - protein, 66 aa, Homo Sapiens
SSAYGQKEPRKPQNRMLKRKNKALLGTWNQSAVMLGLHVVCFVGTTGPGMGLHCCDFLLPGDLGLS

SEQ ID NO: 279 - protein, 57 aa, Homo Sapiens
RKPQNRMLKRKNKALLGTWNQSAVMLGLHVVCFVGTTGPGMGLHCCDFLLPGDLGLS

SEQ ID NO: 280 - protein, 7 aa, Homo Sapiens
LKIMQES

SEQ ID NO: 281 - protein, 20 aa, Homo Sapiens
WSSYTGFWPEEPTPHSTRLC

SEQ ID NO: 282 - protein, 2 aa, Homo Sapiens
CL

SEQ ID NO: 283 - protein, 5 aa, Homo Sapiens
WLWGP

SEQ ID NO: 284 - protein, 43 aa, Homo Sapiens
TPNPTSAPRAGSSSVPEADGPAEATKTNPGSYSLIKKIFADKK

SEQ ID NO: 285 - protein, 27 aa, Homo Sapiens
EADGPAEATKTNPGSYSLIKKIFADKK

SEQ ID NO: 286 - protein, 24 aa, Homo Sapiens
STACESLRLIMSSPSPASGTLYLS

SEQ ID NO: 287 - protein, 4 aa, Homo Sapiens
LYLS

SEQ ID NO: 288 - protein, 14 aa, Homo Sapiens
MSTVGRCLRSPPCG

SEQ ID NO: 289 - protein, 7 aa, Homo Sapiens
LRSPPCG

SEQ ID NO: 290 - protein, 10 aa, Homo Sapiens
PTTCTGNTGT

SEQ ID NO: 291 - protein, 9 aa, Homo Sapiens
TTCTGNTGT

SEQ ID NO: 292 - protein, 9 aa, Homo Sapiens
APEPTPFRS

SEQ ID NO: 293 - protein, 8 aa, Homo Sapiens
PEPTPFRS

SEQ ID NO: 294 - protein, 53 aa, Homo Sapiens
ASAAGRLSSSSTTPRSSSRCPTGSCAVSTSHASPPRGPTPSSRCRALVRVCPK

SEQ ID NO: 295 - protein, 48 aa, Homo Sapiens
RLSSSSTTPRSSSRCPTGSCAVSTSHASPPRGPTPSSRCRALVRVCPK

SEQ ID NO: 296 - protein, 32 aa, Homo Sapiens
TGSCAVSTSHASPPRGPTPSSRCRALVRVCPK

SEQ ID NO: 297 - protein, 19 aa, Homo Sapiens
PRGPTPSSRCRALVRVCPK

SEQ ID NO: 298 - protein, 15 aa, Homo Sapiens
TPSSRCRALVRVCPK

SEQ ID NO: 299 - protein, 13 aa, Homo Sapiens
SSRCRALVRVCPK

SEQ ID NO: 300 - protein, 23 aa, Homo Sapiens
CAGCSEDTVNLRRSIATCITACT

SEQ ID NO: 301 - protein, 3 aa, Homo Sapiens
MAK

SEQ ID NO: 302 - protein, 1 aa, Homo Sapiens
L

SEQ ID NO: 303 - protein, 26 aa, Homo Sapiens
AVMLVVCITTGSTSTNTTQATLGKLV

SEQ ID NO: 304 - protein, 86 aa, Homo Sapiens
PRAPEPPAPRAIKSAGFLTCLDWASLFETLWGALALCVVIQAMSSKLCMSPCPSGGDVNGWPCRRGGVAALSLVRARVTVFTEKVC

SEQ ID NO: 305 - protein, 31 aa, Homo Sapiens
MVMEATKKQSTCCPVASGSSWSTTSRSWKCC

SEQ ID NO: 306 - protein, 63 aa, Homo Sapiens
LLAISGVSGTKGSTQLFLKLKVFTPEMKQNSIWARDALMYIKQRTTQSLLAANQTKPESSGEK

SEQ ID NO: 307 - protein, 6 aa, Homo Sapiens
PPSGKW

SEQ ID NO: 308 - protein, 5 aa, Homo Sapiens
PPRPA

SEQ ID NO: 309 - skipped

SEQ ID NO: 310 - protein, 6 aa, Homo Sapiens
MHRANL

SEQ ID NO: 311 - protein, 1 aa, Homo Sapiens
L

SEQ ID NO: 312 - protein, 9 aa, Homo Sapiens
CTSLGNTEL

SEQ ID NO: 313 - protein, 5 aa, Homo Sapiens
LVVAP

SEQ ID NO: 314 - protein, 27 aa, Homo Sapiens
CSTKVSALQLTLVCLYLVSDPLPKPGL

SEQ ID NO: 315 - protein, 1 aa, Homo Sapiens
L

SEQ ID NO: 316 - protein, 21 aa, Homo Sapiens
IVRLLLLPSSVLTSMLPLNNF

SEQ ID NO: 317 - protein, 17 aa, Homo Sapiens
SILPWLLKNKWLLSMRV

SEQ ID NO: 318 - protein, 68 aa, Homo Sapiens
LRPWSAPFLGGPDWSPEMLWVHLSLLQGTSMPLTLIFKRLGLLRCPLFLKSVFLELIPLLILKKLGVS

SEQ ID NO: 319 - protein, 65 aa, Homo Sapiens
WSAPFLGGPDWSPEMLWVHLSLLQGTSMPLTLIFKRLGLLRCPLFLKSVFLELIPLLILKKLGVS

SEQ ID NO: 320 - protein, 49 aa, Homo Sapiens
WVHLSLLQGTSMPLTLIFKRLGLLRCPLFLKSVFLELIPLLILKKLGVS

SEQ ID NO: 321 - protein, 44 aa, Homo Sapiens
MLQGTSMPLTLIFKRLGLLRCPLFLKSVFLELIPLLILKKLGVS

SEQ ID NO: 322 - protein, 10 aa, Homo Sapiens
MVMVLPAYMG

SEQ ID NO: 323 - protein, 3 aa, Homo Sapiens
LQA

SEQ ID NO: 324 - protein, 5 aa, Homo Sapiens
LEMIN

SEQ ID NO: 325 - protein, 3 aa, Homo Sapiens
WVV

SEQ ID NO: 326 - protein, 10 aa, Homo Sapiens
MVPRRVGELV

SEQ ID NO: 327 - protein, 1 aa, Homo Sapiens
V

SEQ ID NO: 328 - protein, 31 aa, Homo Sapiens
VSFLEFQCGNQCRLALRLWIAWCQLVVVSVN

SEQ ID NO: 329 - protein, 7 aa, Homo Sapiens
MVVVSVN

SEQ ID NO: 330 - protein, 49 aa, Homo Sapiens
MVTDRLGKPQLLLTQSLTRNVSMMDLMKRRSCTVFMLLLVKRDPLLPSW

SEQ ID NO: 331 - protein, 11 aa, Homo Sapiens
MVKRDPLLPSW

SEQ ID NO: 332 - protein, 3 aa, Homo Sapiens
WDL

SEQ ID NO: 333 - protein, 42 aa, Homo Sapiens
ELVTKSEAYFIGLILTSFWWHSKKWEESPPLLEMRQSLPLNY

SEQ ID NO: 334 - protein, 50 aa, Homo Sapiens
KTGRPGSPTTSLRSSNYWMIIRNVSLWEQTMWAPSRCSRSACPFAGRLWC

SEQ ID NO: 335 - protein, 45 aa, Homo Sapiens
GSPTTSLRSSNYWMIIRNVSLWEQTMWAPSRCSRSACPFAGRLWC

SEQ ID NO: 336 - protein, 33 aa, Homo Sapiens
WMIIRNVSLWEQTMWAPSRCSRSACPFAGRLWC

SEQ ID NO: 337 - protein, 25 aa, Homo Sapiens
MWEQTMWAPSRCSRSACPFAGRLWC

SEQ ID NO: 338 - protein, 53 aa, Homo Sapiens
LCSPRRTSLRSGTCCWPIRCQLLPVLVPLPHVKSLCQPRTLVSGPRRPPFSRL

SEQ ID NO: 339 - protein, 15 aa, Homo Sapiens
RTLVSGPRRPPFSRL

SEQ ID NO: 340 - protein, 5 aa, Homo Sapiens
APLKS

SEQ ID NO: 341-342 - skipped (2 entries)

SEQ ID NO: 343 - protein, 156 aa, Homo Sapiens [sequence omitted]

SEQ ID NO: 344 - protein, 150 aa, Homo Sapiens
LGWSSSRCSTMAASTTLKCLISQRKLCILASWRVSAMLPVSVCRLATQLLHQYPILSSTGTNESWPCLWRRITPSHLLKRSRPSWLIHLPLWLLPLWLLPPQLLLLLLQPQLRLKPRKSRRSRTRIWDLVSLTNHQKATNLASFICKTRK

SEQ ID NO: 345 - protein, 142 aa, Homo Sapiens
STMAASTTLKCLISQRKLCILASWRVSAMLPVSVCRLATQLLHQYPILSSTGTNESWPCLWRRITPSHLLKRSRPSWLIHLPLWLLPLWLLPPQLLLLLLQPQLRLKPRKSRRSRTRIWDLVSLTNHQKATNLASFICKTRK

SEQ ID NO: 346 - protein, 138 aa, Homo Sapiens
ASTTLKCLISQRKLCILASWRVSAMLPVSVCRLATQLLHQYPILSSTGTNESWPCLWRRITPSHLLKRSRPSWLIHLPLWLLPLWLLPPQLLLLLLQPQLRLKPRKSRRSRTRIWDLVSLTNHQKATNLASFICKTRK

SEQ ID NO: 347 - protein, 138 aa, Homo Sapiens
RSTTLKCLISQRKLCILASWRVSAMLPVSVCRLATQLLHQYPILSSTGTNESWPCLWRRITPSHLLKRSRPSWLIHLPLWLLPLWLLPPQLLLLLLQPQLRLKPRKSRRSRTRIWDLVSLTNHQKATNLASFICKTRK

SEQ ID NO: 348 - protein, 134 aa, Homo Sapiens
LKCLISQRKLCILASWRVSAMLPVSVCRLATQLLHQYPILSSTGTNESWPCLWRRITPSHLLKRSRPSWLIHLPLWLLPLWLLPPQLLLLLLQPQLRLKPRKSRRSRTRIWDLVSLTNHQKATNLASFICKTRK

SEQ ID NO: 349 - protein, 125 aa, Homo Sapiens
LCILASWRVSAMLPVSVCRLATQLLHQYPILSSTGTNESWPCLWRRITPSHLLKRSRPSWLIHLPLWLLPLWLLPPQLLLLLLQPQLRLKPRKSRRSRTRIWDLVSLTNHQKATNLASFICKTRK

SEQ ID NO: 350 - protein, 123 aa, Homo Sapiens
ILASWRVSAMLPVSVCRLATQLLHQYPILSSTGTNESWPCLWRRITPSHLLKRSRPSWLIHLPLWLLPLWLLPPQLLLLLLQPQLRLKPRKSRRSRTRIWDLVSLTNHQKATNLASFICKTRK

SEQ ID NO: 351 - protein, 119 aa, Homo Sapiens
WRVSAMLPVSVCRLATQLLHQYPILSSTGTNESWPCLWRRITPSHLLKRSRPSWLIHLPLWLLPLWLLPPQLLLLLLQPQLRLKPRKSRRSRTRIWDLVSLTNHQKATNLASFICKTRK

SEQ ID NO: 352 - protein, 104 aa, Homo Sapiens
TQLLHQYPILSSTGTNESWPCLWRRITPSHLLKRSRPSWLIHLPLWLLPLWLLPPQLLLLLLQPQLRLKPRKSRRSRTRIWDLVSLTNHQKATNLASFICKTRK

SEQ ID NO: 353 - protein, 96 aa, Homo Sapiens
ILSSTGTNESWPCLWRRITPSHLLKRSRPSWLIHLPLWLLPLWLLPPQLLLLLLQPQLRLKPRKSRRSRTRIWDLVSLTNHQKATNLASFICKTRK

SEQ ID NO: 354 - protein, 84 aa, Homo Sapiens
CLWRRITPSHLLKRSRPSWLIHLPLWLLPLWLLPPQLLLLLLQPQLRLKPRKSRRSRTRIWDLVSLTNHQKATNLASFICKTRK

SEQ ID NO: 355 - protein, 1 aa, Homo Sapiens
V

SEQ ID NO: 356-357 - skipped (2 entries)

SEQ ID NO: 358 - protein, 2 aa, Homo Sapiens
LS

SEQ ID NO: 359 - protein, 8 aa, Homo Sapiens
LLIGCMTP

SEQ ID NO: 360 - protein, 7 aa, Homo Sapiens
SFCTTMR

SEQ ID NO: 361 - protein, 20 aa, Homo Sapiens
GLACLQRPWPTSTLGASSAM

SEQ ID NO: 362 - protein, 10 aa, Homo Sapiens
TSTLGASSAM

SEQ ID NO: 363 - protein, 9 aa, Homo Sapiens
LVFLTKPLL

SEQ ID NO: 364 - protein, 9 aa, Homo Sapiens
VRRAGGFGN

SEQ ID NO: 365 - protein, 7 aa, Homo Sapiens
LAFQRAV

SEQ ID NO: 366 - protein, 4 aa, Homo Sapiens
LWMA

SEQ ID NO: 367 - skipped

SEQ ID NO: 368 - protein, 12 aa, Homo Sapiens
TCCSDRVCWASR

SEQ ID NO: 369 - protein, 10 aa, Homo Sapiens
CSDRVCWASR

SEQ ID NO: 370 - protein, 16 aa, Homo Sapiens
GTQLVRLALRSPCLTT

SEQ ID NO: 371 - protein, 14 aa, Homo Sapiens
QLVRLALRSPCLTT

SEQ ID NO: 372 - protein, 8 aa, Homo Sapiens
LRSPCLTT

SEQ ID NO: 373 - protein, 10 aa, Homo Sapiens
LSLMASSKLN

SEQ ID NO: 374 - protein, 4 aa, Homo Sapiens
CLTT

SEQ ID NO: 375 - protein, 3 aa, Homo Sapiens
LTT

SEQ ID NO: 376 - protein, 1 aa, Homo Sapiens
T

SEQ ID NO: 377 - protein, 50 aa, Homo Sapiens
MWNPKMRYCPPPPSQNRRVGSQSRLPCPSQSPQHNRVSLAAVFWSLDVAL

SEQ ID NO: 378 - protein, 48 aa, Homo Sapiens
DPKMRYCPPPPSQNRRVGSQSRLPCPSQSPQHNRVSLAAVFWSLDVAL

SEQ ID NO: 379 - protein, 45 aa, Homo Sapiens
MRYCPPPPSQNRRVGSQSRLPCPSQSPQHNRVSLAAVFWSLDVAL

SEQ ID NO: 380 - protein, 45 aa, Homo Sapiens; identical to SEQ ID NO: 379

SEQ ID NO: 381 - protein, 32 aa, Homo Sapiens
VGSQSRLPCPSQSPQHNRVSLAAVFWSLDVAL

SEQ ID NO: 382 - protein, 26 aa, Homo Sapiens
LPCPSQSPQHNRVSLAAVFWSLDVAL

SEQ ID NO: 383 - protein, 21 aa, Homo Sapiens
QSPQHNRVSLAAVFWSLDVAL

SEQ ID NO: 384 - protein, 3 aa, Homo Sapiens
GMM

SEQ ID NO: 385 - protein, 25 aa, Homo Sapiens
MERRSSPGPKEPKLHLMVSRVVCLK

SEQ ID NO: 386 - protein, 12 aa, Homo Sapiens
MHLMVSRVVCLK

SEQ ID NO: 387 - protein, 2 aa, Homo Sapiens
LK

SEQ ID NO: 388 - protein, 14 aa, Homo Sapiens
LICRMMKLHLENSS

SEQ ID NO: 389 - protein, 12 aa, Homo Sapiens
CRMMKLHLENSS

SEQ ID NO: 390 - protein, 27 aa, Homo Sapiens
VLLKNATIRYGRPLMLSTNRSAKSGRR

SEQ ID NO: 391 - protein, 5 aa, Homo Sapiens
KSGRR

SEQ ID NO: 392 - protein, 2 aa, Homo Sapiens
MT

SEQ ID NO: 393 - protein, 2 aa, Homo Sapiens
IN

SEQ ID NO: 394 - skipped

SEQ ID NO: 395 - protein, 4 aa, Homo Sapiens
MEKT

SEQ ID NO: 396 - protein, 1 aa, Homo Sapiens
T

SEQ ID NO: 397 - protein, 15 aa, Homo Sapiens
VANLFILSMMSSLEK

SEQ ID NO: 398 - protein, 14 aa, Homo Sapiens
ANLFILSMMSSLEK

SEQ ID NO: 399 - protein, 13 aa, Homo Sapiens
NLFILSMMSSLEK

SEQ ID NO: 400 - protein, 10 aa, Homo Sapiens
ILSMMSSLEK

SEQ ID NO: 401 - protein, 9 aa, Homo Sapiens
LSMMSSLEK

SEQ ID NO: 402 - protein, 1 aa, Homo Sapiens
C

SEQ ID NO: 403 - skipped

SEQ ID NO: 404 - protein, 52 aa, Homo Sapiens
SLNWESSWSFMVKAVVLEKPLGTRQVLKLNELMDMNHQSKNLFKVQTSNSGK

SEQ ID NO: 405 - protein, 51 aa, Homo Sapiens
LNWESSWSFMVKAVVLEKPLGTRQVLKLNELMDMNHQSKNLFKVQTSNSGK

SEQ ID NO: 406 - protein, 49 aa, Homo Sapiens
WESSWSFMVKAVVLEKPLGTRQVLKLNELMDMNHQSKNLFKVQTSNSGK

SEQ ID NO: 407 - protein, 42 aa, Homo Sapiens
MVKAVVLEKPLGTRQVLKLNELMDMNHQSKNLFKVQTSNSGK

SEQ ID NO: 408 - protein, 36 aa, Homo Sapiens
LEKPLGTRQVLKLNELMDMNHQSKNLFKVQTSNSGK

SEQ ID NO: 409 - protein, 33 aa, Homo Sapiens
PLGTRQVLKLNELMDMNHQSKNLFKVQTSNSGK

SEQ ID NO: 410 - protein, 32 aa, Homo Sapiens
LGTRQVLKLNELMDMNHQSKNLFKVQTSNSGK

SEQ ID NO: 411 - protein, 21 aa, Homo Sapiens
VMDMNHQSKNLFKVQTSNSGK

SEQ ID NO: 412 - protein, 16 aa, Homo Sapiens
HQSKNLFKVQTSNSGK

SEQ ID NO: 413 - protein, 15 aa, Homo Sapiens
QSKNLFKVQTSNSGK

SEQ ID NO: 414 - protein, 49 aa, Homo Sapiens
LDLLKQPIMIRKSFSITVSSLVMLIAWNWGTWSSIACPKAKATKSVQKK

SEQ ID NO: 415 - protein, 7 aa, Homo Sapiens
LASLTMK

SEQ ID NO: 416 - protein, 21 aa, Homo Sapiens
GESVRAPRLLQLLDLIGWSIA

SEQ ID NO: 417 - protein, 22 aa, Homo Sapiens
LVQKERSVKLVSLTNHIHKAHH

SEQ ID NO: 418 - protein, 11 aa, Homo Sapiens
VGPPRWLWPMP

SEQ ID NO: 419 - protein, 12 aa, Homo Sapiens
LWRLVLWQLEEF

SEQ ID NO: 420 - protein, 21 aa, Homo Sapiens
LGSGAPMMCRSMTFPCRITLQ

SEQ ID NO: 421 - protein, 7 aa, Homo Sapiens
ATTARSS

SEQ ID NO: 422 - protein, 77 aa, Homo Sapiens
SGCCAQALVRLPSGTLRPLLSAWQMSSSMLPRAPRTPMPLRRRTSWSVWPSPTADFPSCCPINLSALWGSPSQKKKK

SEQ ID NO: 423 - protein, 65 aa, Homo Sapiens
SGTLRPLLSAWQMSSSMLPRAPRTPMPLRRRTSWSVWPSPTADFPSCCPINLSALWGSPSQKKKK

SEQ ID NO: 424 - protein, 46 aa, Homo Sapiens
RAPRTPMPLRRRTSWSVWPSPTADFPSCCPINLSALWGSPSQKKKK

SEQ ID NO: 425 - protein, 37 aa, Homo Sapiens
RRRTSWSVWPSPTADFPSCCPINLSALWGSPSQKKKK

SEQ ID NO: 426 - protein, 26 aa, Homo Sapiens
LLTLWVKNGRVMWSESVVGTTNKVSP

SEQ ID NO: 427 - protein, 7 aa, Homo Sapiens
TTNKVSP

SEQ ID NO: 428 - protein, 5 aa, Homo Sapiens
MWMQI

SEQ ID NO: 429 - protein, 25 aa, Homo Sapiens
WAPKELAESANFSISLKKMMSASML

SEQ ID NO: 430 - protein, 3 aa, Homo Sapiens
SML

SEQ ID NO: 431 - skipped

SEQ ID NO: 432 - protein, 19 aa, Homo Sapiens
RFSVLLLHVSCSTNGGVLL

SEQ ID NO: 433 - protein, 14 aa, Homo Sapiens
LLHVSCSTNGGVLL

SEQ ID NO: 434 - protein, 9 aa, Homo Sapiens
CSTNGGVLL

SEQ ID NO: 435 - protein, 4 aa, Homo Sapiens
GVLL

SEQ ID NO: 436 - protein, 3 aa, Homo Sapiens
VLL

SEQ ID NO: 437 - protein, 2 aa, Homo Sapiens
ML

SEQ ID NO: 438 - protein, 19 aa, Homo Sapiens
VPRKIKKRLQNMLNFWPRE

SEQ ID NO: 439 - protein, 10 aa, Homo Sapiens
ENMLNFWPRE

SEQ ID NO: 440 - protein, 4 aa, Homo Sapiens
WPRE

SEQ ID NO: 441 - protein, 2 aa, Homo Sapiens
RE

SEQ ID NO: 442 - protein, 33 aa, Homo Sapiens
VRRSARNKLRRDADFPLCELLLLSLNPVRNKIF

SEQ ID NO: 443 - protein, 25 aa, Homo Sapiens
LRRDADFPLCELLLLSLNPVRNKIF

SEQ ID NO: 444 - protein, 25 aa, Homo Sapiens
MRRDADFPLCELLLLSLNPVRNKIF

SEQ ID NO: 445 - protein, 24 aa, Homo Sapiens
GRDADFPLCELLLLSLNPVRNKIF

SEQ ID NO: 446 - protein, 15 aa, Homo Sapiens
ELLLLSLNPVRNKIF

SEQ ID NO: 447 - protein, 47 aa, Homo Sapiens
MKWTMNANFVLSMRSVWPQKLLLTLWVKNGRVMWSESVVGTTNKVSP

SEQ ID NO: 448 - protein, 6 aa, Homo Sapiens
LFPFLN

SEQ ID NO: 449 - protein, 39 aa, Homo Sapiens
WRKSSVGSMSSLSLRGEFCLSQLEKAVQKISKSVPGAVL

SEQ ID NO: 450 - protein, 15 aa, Homo Sapiens
RMLILNSQSFNCKQK

SEQ ID NO: 451 - protein, 40 aa, Homo Sapiens
PLFSATGMRLAWMQLPFLDSLWRLQSCCGMSPASLTSQGL

SEQ ID NO: 452 - protein, 3 aa, Homo Sapiens
GNC

SEQ ID NO: 453 - protein, 8 aa, Homo Sapiens
MGCWMRAR

SEQ ID NO: 454 - protein, 10 aa, Homo Sapiens
SAISGSASRW

SEQ ID NO: 455 - protein, 22 aa, Homo Sapiens
WIPRSTSTSLCALPTGVAARAA

SEQ ID NO: 456 - protein, 3 aa, Homo Sapiens
RAA

SEQ ID NO: 457 - protein, 1 aa, Homo Sapiens
A

SEQ ID NO: 458 - protein, 29 aa, Homo Sapiens
VGLGLETTRRRIKSTCPSWAAGLSRFPAK

SEQ ID NO: 459 - protein, 25 aa, Homo Sapiens
LETTRRRIKSTCPSWAAGLSRFPAK

SEQ ID NO: 460 - protein, 5 aa, Homo Sapiens
VAKLM

SEQ ID NO: 461 - protein, 121 aa, Homo Sapiens
LPGDISTGTLPMRVSSISVITFICPRRLCLPPYAVAVQRLAGLGLKVWRVSDLRDSQEGKLTEIPTDGVLCHLVPTRKPRLGLGQQPNSSLEADLVVDVVSHLSKIGEDSFALNKLTAKKP

SEQ ID NO: 462 - protein, 94 aa, Homo Sapiens
MCLPPYAVAVQRLAGLGLKVWRVSDLRDSQEGKLTEIPTDGVLCHLVPTRKPRLGLGQQPNSSLEADLVVDVVSHLSKIGEDSFALNKLTAKKP

SEQ ID NO: 463 - protein, 77 aa, Homo Sapiens
LKVWRVSDLRDSQEGKLTEIPTDGVLCHLVPTRKPRLGLGQQPNSSLEADLVVDVVSHLSKIGEDSFALNKLTAKKP

SEQ ID NO: 464 - protein, 69 aa, Homo Sapiens
LRDSQEGKLTEIPTDGVLCHLVPTRKPRLGLGQQPNSSLEADLVVDVVSHLSKIGEDSFALNKLTAKKP

SEQ ID NO: 465 - protein, 27 aa, Homo Sapiens
LVVDVVSHLSKIGEDSFALNKLTAKKP

SEQ ID NO: 466 - protein, 10 aa, Homo Sapiens
AFSASTCSTA

SEQ ID NO: 467 - protein, 5 aa, Homo Sapiens
MLLEV

SEQ ID NO: 468 - protein, 5 aa, Homo Sapiens
HKYVL

SEQ ID NO: 469 - protein, 1 aa, Homo Sapiens
L

SEQ ID NO: 470 - protein, 35 aa, Homo Sapiens
WLDIIRPSESSLPIGNMNHLQPLPWSHKFVCVLKQ

SEQ ID NO: 471 - protein, 40 aa, Homo Sapiens
MSPLSTNSAMSVACQLELFTSSVKGRRKHLLTKGLGSLSC

SEQ ID NO: 472 - protein, 46 aa, Homo Sapiens
RPTPTRQANSCARSPRKTARTRCPPALAWLTRKRRRSRPWRLRKKE

SEQ ID NO: 473 - protein, 72 aa, Homo Sapiens
HLVNEDSKSHLKKRVKEANFQLIDRLLTDLFEVVVVLEEVEGAVDVEWAEEMDLILVANVNLIGIVEVIDLA

SEQ ID NO: 474 - protein, 46 aa, Homo Sapiens; identical to SEQ ID NO: 472

SEQ ID NO: 475 - protein, 78 aa, Homo Sapiens
HLVNEDSKSHLKKRVKEANFQLIDRLLTDLFEVVVVLEEVEGAVDVEWAEEMDLILVANVNLIGIVEVIDLLFHITVA

SEQ ID NO: 476 - protein, 7 aa, Homo Sapiens
CGLTGMG

SEQ ID NO: 477 - protein, 13 aa, Homo Sapiens
TSVMELRLRILPH

SEQ ID NO: 478 - protein, 2 aa, Homo Sapiens
WR

SEQ ID NO: 479 - protein, 3 aa, Homo Sapiens
LLV

SEQ ID NO: 480 - protein, 2 aa, Homo Sapiens
CW

SEQ ID NO: 481 - protein, 7 aa, Homo Sapiens
WIRRLLK

SEQ ID NO: 482 - protein, 2 aa, Homo Sapiens
MK

SEQ ID NO: 483 - protein, 17 aa, Homo Sapiens
WTSAVCPTFRSLSLQLG

SEQ ID NO: 484 - protein, 30 aa, Homo Sapiens
TTRAWATTSTRTSACARRSPLSPAKSSATR

SEQ ID NO: 485 - protein, 2 aa, Homo Sapiens
AN

SEQ ID NO: 486 - protein, 30 aa, Homo Sapiens
MLSRLLPSVLSQELRWKSPLQMLKSTILIN

SEQ ID NO: 487 - protein, 8 aa, Homo Sapiens
ATCDLCLL

SEQ ID NO: 488 - protein, 2 aa, Homo Sapiens
LL

SEQ ID NO: 489 - protein, 72 aa, Homo Sapiens; identical to SEQ ID NO: 189

SEQ ID NO: 490 - protein, 38 aa, Homo Sapiens
FSQLLQNQLVVTRTAVPGWLNFAKCLDIILLKMCLESC

SEQ ID NO: 491 - protein, 1 aa, Homo Sapiens
F

SEQ ID NO: 492 - protein, 2 aa, Homo Sapiens
FS

SEQ ID NO: 493 - protein, 13 aa, Homo Sapiens
LSLPLQPKSISAM

SEQ ID NO: 494 - protein, 66 aa, Homo Sapiens
ILLMLTSRRRSCGSPDTRKVRSSTQKKRNMRLRSSARLIRKLWTHKFYQKSKLFLSSRATCDLCLL

SEQ ID NO: 495 - protein, 29 aa, Homo Sapiens
MIRKLWTHKFYQKSKLFLSSRATCDLCLL

SEQ ID NO: 496 - protein, 14 aa, Homo Sapiens
LEVLLMQKESCWKK

SEQ ID NO: 497 - protein, 20 aa, Homo Sapiens
LVAKVMLLVIFLESALRLSK

SEQ ID NO: 498 - protein, 15 aa, Homo Sapiens
WPYTKARRKDQDHKY

SEQ ID NO: 499 - protein, 15 aa, Homo Sapiens
LSMSLIFLARKPSAV

SEQ ID NO: 500 - protein, 21 aa, Homo Sapiens
QPFRSSLVKDLSNWFQSTELK

SEQ ID NO: 501 - protein, 27 aa, Homo Sapiens
TCSLFAALTVPDACPRTRPLRNSSFET

SEQ ID NO: 502 - protein, 13 aa, Homo Sapiens
VLALVVSVQTGTV

SEQ ID NO: 503 - protein, 34 aa, Homo Sapiens
VIEILMMRRSLFSTKKQSILNAIYVTRNCIQDLA

SEQ ID NO: 504 - protein, 84 aa, Homo Sapiens
LPTASQGPRVHITVVWEQTEPMAGTSWRPITGPACMLESRLRGLMPRSCLPSGNFRLDLVKESAWEIISGWPVSSCIVCVKTLE

SEQ ID NO: 505 - protein, 75 aa, Homo Sapiens
VHITVVWEQTEPMAGTSWRPITGPACMLESRLRGLMPRSCLPSGNFRLDLVKESAWEIISGWPVSSCIVCVKTLE

SEQ ID NO: 506 - protein, 30 aa, Homo Sapiens [sequence omitted]

SEQ ID NO: 507 - protein, 8 aa, Homo Sapiens
ATLSRTAS

SEQ ID NO: 508 - protein, 6 aa, Homo Sapiens
EPRTSR

SEQ ID NO: 509 - protein, 15 aa, Homo Sapiens
RSRPSRTRSSCSSRR

SEQ ID NO: 510 - protein, 39 aa, Homo Sapiens
AGVRRPSNGAGHKVGGPKRVLNFCCTCLKTQRVMLNLRV

SEQ ID NO: 511 - protein, 16 aa, Homo Sapiens
CCTCLKTQRVMLNLRV

SEQ ID NO: 512 - protein, 12 aa, Homo Sapiens
GPTELMVGLTHT

SEQ ID NO: 513 - protein, 10 aa, Homo Sapiens
TELMVGLTHT

SEQ ID NO: 514 - protein, 19 aa, Homo Sapiens
MFLNQKRRLPRRKRYPRRN

SEQ ID NO: 515 - protein, 9 aa, Homo Sapiens
RRKRYPRRN

SEQ ID NO: 516 - protein, 60 aa, Homo Sapiens
SRCSTITWRTRATSRGMCHHKQMWQYLKPCPAHRLPTCVMPYVGIITSSLTKRKRPACQE

SEQ ID NO: 517 - protein, 42 aa, Homo Sapiens
WANMVLPMWKTLQEVELQIVKMMMTLTSLDLMMRRKVKKQRG

SEQ ID NO: 518 - protein, 2 aa, Homo Sapiens
GN

SEQ ID NO: 519 - skipped

SEQ ID NO: 520 - protein, 36 aa, Homo Sapiens
LPLALCCQWSSSQWVSSSSWWLLWAAAGPARRTIVL

SEQ ID NO: 521 - protein, 11 aa, Homo Sapiens
CCSTAACVPHS

SEQ ID NO: 522 - protein, 27 aa, Homo Sapiens
LCSPRAMQLPSSTRSGLKLVSWPRRSC

SEQ ID NO: 523 - protein, 54 aa, Homo Sapiens [sequence omitted]

SEQ ID NO: 524 - protein, 78 aa, Homo Sapiens
TAYVSAPSRPPLRRALATPRHAAAPQRSWLSSFSTPCATSPRTPGIRTMTALCSPRAMQLPSSTRSGLKLVSWPRRSC

SEQ ID NO: 525 - protein, 15 aa, Homo Sapiens
LPSFSMLMREMPGLL

SEQ ID NO: 526 - protein, 15 aa, Homo Sapiens
LPSFSMLMREMPGLL

SEQ ID NO: 527 - protein, 1 aa, Homo Sapiens
C

SEQ ID NO: 528 - protein, 6 aa, Homo Sapiens
ALLDFL

SEQ ID NO: 529 - protein, 1 aa, Homo Sapiens
V

SEQ ID NO: 530 - protein, 28 aa, Homo Sapiens
RMVTARPSRVPTAQPPVAESSLMGRELW

SEQ ID NO: 531 - protein, 14 aa, Homo Sapiens
MWMLKPTSTRLNRL

SEQ ID NO: 532 - protein, 21 aa, Homo Sapiens
ASALELGVPMLWMSWLGSPGS

SEQ ID NO: 533 - protein, 5 aa, Homo Sapiens
WHPAQ

SEQ ID NO: 534 - protein, 33 aa, Homo Sapiens
RCPPSSRCGSASRSMTSPAPPSSTANASRRTMT

SEQ ID NO: 535 - protein, 13 aa, Homo Sapiens
PSSTANASRRTMT

SEQ ID NO: 536 - protein, 8 aa, Homo Sapiens
NASRRTMT

SEQ ID NO: 537 - protein, 1 aa, Homo Sapiens
A

SEQ ID NO: 538 - protein, 8 aa, Homo Sapiens
RAREASSP

SEQ ID NO: 539 - protein, 2 aa, Homo Sapiens
SP

SEQ ID NO: 540 - protein, 30 aa, Homo Sapiens
SSPTGTTWRKSGTTPSTMSCVWLPRSTPCC

SEQ ID NO: 541 - skipped

SEQ ID NO: 542 - protein, 4 aa, Homo Sapiens
TARR

SEQ ID NO: 543 - protein, 31 aa, Homo Sapiens
RSCLRPSTPQPCTLLSRLCYPCTPLAVPLAS

SEQ ID NO: 544 - protein, 28 aa, Homo Sapiens
LRPSTPQPCTLLSRLCYPCTPLAVPLAS

SEQ ID NO: 545 - protein, 25 aa, Homo Sapiens
STPQPCTLLSRLCYPCTPLAVPLAS

SEQ ID NO: 546 - protein, 22 aa, Homo Sapiens
QPCTLLSRLCYPCTPLAVPLAS

SEQ ID NO: 547 - protein, 20 aa, Homo Sapiens
CTLLSRLCYPCTPLAVPLAS

SEQ ID NO: 548 - protein, 5 aa, Homo Sapiens
VPLAS

SEQ ID NO: 549 - protein, 20 aa, Homo Sapiens
STRGMPSPMPSCVWTWLAGT

SEQ ID NO: 550 - protein, 10 aa, Homo Sapiens
SCVWTWLAGT

SEQ ID NO: 551 - protein, 5 aa, Homo Sapiens
WLAGT

SEQ ID NO: 552 - protein, 2 aa, Homo Sapiens
GT

SEQ ID NO: 553 - skipped

SEQ ID NO: 554 - protein, 1 aa, Homo Sapiens
S

SEQ ID NO: 555 - protein, 90 aa, Homo Sapiens
SPSAATASPPRPSGKSCVTLRRSCATSPWTSSKRWPRLLPAPPWRRATSCLTARSSPLAMSGSAALRHSSSLPSWAWSPVASTKLPSTPS

SEQ ID NO: 556 - protein, 85 aa, Homo Sapiens
TASPPRPSGKSCVTLRRSCATSPWTSSKRWPRLLPAPPWRRATSCLTARSSPLAMSGSAALRHSSSLPSWAWSPVASTKLPSTPS

SEQ ID NO: 557 - protein, 80 aa, Homo Sapiens
RPSGKSCVTLRRSCATSPWTSSKRWPRLLPAPPWRRATSCLTARSSPLAMSGSAALRHSSSLPSWAWSPVASTKLPSTPS

SEQ ID NO: 558 - protein, 78 aa, Homo Sapiens
SGKSCVTLRRSCATSPWTSSKRWPRLLPAPPWRRATSCLTARSSPLAMSGSAALRHSSSLPSWAWSPVASTKLPSTPS

SEQ ID NO: 559 - protein, 62 aa, Homo Sapiens
WTSSKRWPRLLPAPPWRRATSCLTARSSPLAMSGSAALRHSSSLPSWAWSPVASTKLPSTPS

SEQ ID NO: 560 - protein, 53 aa, Homo Sapiens
VLPAPPWRRATSCLTARSSPLAMSGSAALRHSSSLPSWAWSPVASTKLPSTPS

SEQ ID NO: 561 - protein, 37 aa, Homo Sapiens
RSSPLAMSGSAALRHSSSLPSWAWSPVASTKLPSTPS

SEQ ID NO: 562 - protein, 33 aa, Homo Sapiens
MAMSGSAALRHSSSLPSWAWSPVASTKLPSTPS

SEQ ID NO: 563 - protein, 25 aa, Homo Sapiens
LRHSSSLPSWAWSPVASTKLPSTPS

SEQ ID NO: 564 - protein, 22 aa, Homo Sapiens
PPCTLALPTGCRRRSLPWHPAQ

SEQ ID NO: 565 - protein, 1 aa, Homo Sapiens
D

SEQ ID NO: 566 - protein, 7 aa, Homo Sapiens
LPPLFIP

SEQ ID NO: 567 - protein, 8 aa, Homo Sapiens
LAGIFWMT

SEQ ID NO: 568 - protein, 53 aa, Homo Sapiens
WWFSFRLTETLMLELMKLKLNKMLRLYFRLENLNGGQMKKSLSPSLEHEVCLI

SEQ ID NO: 569 - protein, 34 aa, Homo Sapiens
LGQMSRQLWMWWPTVPMIRGKKLKQHLRPPMARI

SEQ ID NO: 570 - protein, 93 aa, Homo Sapiens
LRSMSSSLQLRRLPRACWREARTTTSPSSPTMTSKTTSAGSGTCRLRRSGQNECIHPFPHPCHLEEFSQACSAPCPSSLSTAGSLFNTATFPY

SEQ ID NO: 571 - protein, 28 aa, Homo Sapiens
MVGKELLAERRRWFIEQPQQMTKNFSSP

SEQ ID NO: 572 - protein, 48 aa, Homo Sapiens
TDPTAPAGLRAELLANPVPRFRPLLANLAVTAISPIAVLPRWRWPASS

SEQ ID NO: 573 - protein, 4 aa, Homo Sapiens
LLEG

SEQ ID NO: 574 - protein, 36 aa, Homo Sapiens
SSHSCCMALKCTQTPTRLRNFWRQCCALPGTPSWQL

SEQ ID NO: 575 - protein, 5 aa, Homo Sapiens
TEVTV

SEQ ID NO: 576 - protein, 6 aa, Homo Sapiens
WSAREN

SEQ ID NO: 577 - protein, 1 aa, Homo Sapiens
W

SEQ ID NO: 578 - protein, 153 aa, Homo Sapiens
TTSSKTSTIRWWPPGRSGRWVPRSTSAGPPPACCSLAGGCFAATVHPAQTSLTPPSILLPALLLPATTCKVPRLHSVPLCFVLPWTELSAGCDPRRALPRATGCWGLGTGQRLSQAGRQQPSASLAHSDNFPRPPPASKNRVHPPLDIGEGRK

SEQ ID NO: 579 - protein, 32 aa, Homo Sapiens
RRGPAEPPVSPLSPGSPTRARAAARRCTSLRR

SEQ ID NO: 580 - protein, 36 aa, Homo Sapiens
CNLNSFHLFKKRCYHLIVFKEKWHSLLGEVLALVKE

SEQ ID NO: 581 - protein, 36 aa, Homo Sapiens
RFPARAPWRCRAPRSTCCIPATIRWPRASTTWRPGT

SEQ ID NO: 582 - protein, 31 aa, Homo Sapiens
RMCLSRMFVVATLLVTAKMTHQWKQLASLLR

SEQ ID NO: 583 - protein, 26 aa, Homo Sapiens
RMFVVATLLVTAKMTHQWKQLASLLR

SEQ ID NO: 584 - protein, 3 aa, Homo Sapiens
MDT

SEQ ID NO: 585 - protein, 23 aa, Homo Sapiens
VVATLLVTAKMTHQWKQLASLLR

SEQ ID NO: 586 - protein, 18 aa, Homo Sapiens
LVTAKMTHQWKQLASLLR

SEQ ID NO: 587 - protein, 15 aa, Homo Sapiens
RKMTHQWKQLASLLR

SEQ ID NO: 588 - protein, 11 aa, Homo Sapiens
HQWKQLASLLR

SEQ ID NO: 589 - protein, 10 aa, Homo Sapiens
QWKQLASLLR

SEQ ID NO: 590 - protein, 4 aa, Homo Sapiens
SLLR

SEQ ID NO: 591 - protein, 2 aa, Homo Sapiens
VR

SEQ ID NO: 592 - protein, 4 aa, Homo Sapiens
IQAK

SEQ ID NO: 593 - protein, 1 aa, Homo Sapiens
K

SEQ ID NO: 594 - skipped

SEQ ID NO: 595 - protein, 18 aa, Homo Sapiens
MPLYWIATRLTLHASLLS

SEQ ID NO: 596 - protein, 16 aa, Homo Sapiens
LYWIATRLTLHASLLS

SEQ ID NO: 597 - protein, 14 aa, Homo Sapiens
WIATRLTLHASLLS

SEQ ID NO: 598 - protein, 11 aa, Homo Sapiens
TRLTLHASLLS

SEQ ID NO: 599 - protein, 9 aa, Homo Sapiens
VTLHASLLS

SEQ ID NO: 600 - protein, 7 aa, Homo Sapiens
MHASLLS

SEQ ID NO: 601 - protein, 3 aa, Homo Sapiens
LLS

SEQ ID NO: 602 - protein, 2 aa, Homo Sapiens
VS

SEQ ID NO: 603 - protein, 15 aa, Homo Sapiens
MIAVLVKSWKMALNS

SEQ ID NO: 604 - protein, 12 aa, Homo Sapiens
VLVKSWKMALNS

SEQ ID NO: 605 - protein, 11 aa, Homo Sapiens
LVKSWKMALNS

SEQ ID NO: 606 - protein, 8 aa, Homo Sapiens
SWKMALNS

SEQ ID NO: 607 - protein, 3 aa, Homo Sapiens
LNS

SEQ ID NO: 608 - protein, 28 aa, Homo Sapiens
LLIWFLASPCVLRASQTIHLWVALLFVI

SEQ ID NO: 609 - protein, 28 aa, Homo Sapiens
MLIWFLASPCVLRASQTIHLWVALLFVI

SEQ ID NO: 610 - protein, 26 aa, Homo Sapiens
IWFLASPCVLRASQTIHLWVALLFVI

SEQ ID NO: 611 - protein, 19 aa, Homo Sapiens
CVLRASQTIHLWVALLFVI

SEQ ID NO: 612 - protein, 16 aa, Homo Sapiens
RASQTIHLWVALLFVI

SEQ ID NO: 613 - protein, 8 aa, Homo Sapiens
WVALLFVI

SEQ ID NO: 614 - protein, 5 aa, Homo Sapiens
LLFVI

SEQ ID NO: 615 - protein, 2 aa, Homo Sapiens
VI

SEQ ID NO: 616 - protein, 2 aa, Homo Sapiens
AI

SEQ ID NO: 617 - protein, 17 aa, Homo Sapiens
RSPSLPRKLRRLNEYYP

SEQ ID NO: 618 - protein, 11 aa, Homo Sapiens
RKLRRLNEYYP

SEQ ID NO: 619 - protein, 6 aa, Homo Sapiens
VNEYYP

SEQ ID NO: 620 - protein, 30 aa, Homo Sapiens
ASTKEPLKNLRRRLLRWERAPSSMPGSWIN

SEQ ID NO: 621 - protein, 26 aa, Homo Sapiens
EPLKNLRRRLLRWERAPSSMPGSWIN

SEQ ID NO: 622 - protein, 24 aa, Homo Sapiens
MKNLRRRLLRWERAPSSMPGSWIN

SEQ ID NO: 623 - protein, 21 aa, Homo Sapiens
LRRRLLRWERAPSSMPGSWIN

SEQ ID NO: 624 - protein, 3 aa, Homo Sapiens
WIN

SEQ ID NO: 625 - protein, 7 aa, Homo Sapiens
LRPASTM

SEQ ID NO: 626 - protein, 30 aa, Homo Sapiens
MLLLVLVNLKLVSPRMGRPESMPFWLTHWV

SEQ ID NO: 627 - protein, 28 aa, Homo Sapiens
LLVLVNLKLVSPRMGRPESMPFWLTHWV

SEQ ID NO: 628 - protein, 24 aa, Homo Sapiens
VNLKLVSPRMGRPESMPFWLTHWV

SEQ ID NO: 629 - protein, 22 aa, Homo Sapiens
LKLVSPRMGRPESMPFWLTHWV

SEQ ID NO: 630 - protein, 11 aa, Homo Sapiens
ESMPFWLTHWV

SEQ ID NO: 631 - protein, 7 aa, Homo Sapiens
FWLTHWV

SEQ ID NO: 632 - protein, 5 aa, Homo Sapiens
VTHWV

SEQ ID NO: 633 - protein, 4 aa, Homo Sapiens
THWV

SEQ ID NO: 634 - skipped

SEQ ID NO: 635 - protein, 3 aa, Homo Sapiens
HWV

SEQ ID NO: 636 - protein, 39 aa, Homo Sapiens
MSVLTKWIPLSHPTARRDMRKLLRKSALTLRKLATTPTQ

SEQ ID NO: 637 - protein, 35 aa, Homo Sapiens
TKWIPLSHPTARRDMRKLLRKSALTLRKLATTPTQ

SEQ ID NO: 638 - protein, 30 aa, Homo Sapiens
LSHPTARRDMRKLLRKSALTLRKLATTPTQ

SEQ ID NO: 639 - protein, 26 aa, Homo Sapiens
TARRDMRKLLRKSALTLRKLATTPTQ

SEQ ID NO: 640 - protein, 24 aa, Homo Sapiens
RRDMRKLLRKSALTLRKLATTPTQ

SEQ ID NO: 641 - protein, 18 aa, Homo Sapiens
MLRKSALTLRKLATTPTQ

SEQ ID NO: 642 - protein, 13 aa, Homo Sapiens
RLTLRKLATTPTQ

SEQ ID NO: 643 - protein, 7 aa, Homo Sapiens
MATTPTQ

SEQ ID NO: 644 - protein, 5 aa, Homo Sapiens
TTPTQ

SEQ ID NO: 645 - protein, 2 aa, Homo Sapiens
TQ

SEQ ID NO: 646 - protein, 99 aa, Homo Sapiens
LCQFLVGMVTTCWSQVLTCLGSRDGKSPVRMAMPVEPRCLRLWTASYHQLVQLTSPCACLSRMSTKLVVLVLFLLAEWRLVFSNPVWWSPLLQSTLQRK

SEQ ID NO: 647 - protein, 97 aa, Homo Sapiens
QFLVGMVTTCWSQVLTCLGSRDGKSPVRMAMPVEPRCLRLWTASYHQLVQLTSPCACLSRMSTKLVVLVLFLLAEWRLVFSNPVWWSPLLQSTLQRK

SEQ ID NO: 648 - protein, 96 aa, Homo Sapiens
FLVGMVTTCWSQVLTCLGSRDGKSPVRMAMPVEPRCLRLWTASYHQLVQLTSPCACLSRMSTKLVVLVLFLLAEWRLVFSNPVWWSPLLQSTLQRK

SEQ ID NO: 649 - protein, 95 aa, Homo Sapiens
LVGMVTTCWSQVLTCLGSRDGKSPVRMAMPVEPRCLRLWTASYHQLVQLTSPCACLSRMSTKLVVLVLFLLAEWRLVFSNPVWWSPLLQSTLQRK

SEQ ID NO: 650 - protein, 93 aa, Homo Sapiens
GMVTTCWSQVLTCLGSRDGKSPVRMAMPVEPRCLRLWTASYHQLVQLTSPCACLSRMSTKLVVLVLFLLAEWRLVFSNPVWWSPLLQSTLQRK

SEQ ID NO: 651 - protein, 92 aa, Homo Sapiens
MVTTCWSQVLTCLGSRDGKSPVRMAMPVEPRCLRLWTASYHQLVQLTSPCACLSRMSTKLVVLVLFLLAEWRLVFSNPVWWSPLLQSTLQRK

SEQ ID NO: 652 - protein, 89 aa, Homo Sapiens
TCWSQVLTCLGSRDGKSPVRMAMPVEPRCLRLWTASYHQLVQLTSPCACLSRMSTKLVVLVLFLLAEWRLVFSNPVWWSPLLQSTLQRK

SEQ ID NO: 653 - protein, 89 aa, Homo Sapiens
KCWSQVLTCLGSRDGKSPVRMAMPVEPRCLRLWTASYHQLVQLTSPCACLSRMSTKLVVLVLFLLAEWRLVFSNPVWWSPLLQSTLQRK

SEQ ID NO: 654 - protein, 85 aa, Homo Sapiens
QVLTCLGSRDGKSPVRMAMPVEPRCLRLWTASYHQLVQLTSPCACLSRMSTKLVVLVLFLLAEWRLVFSNPVWWSPLLQSTLQRK

SEQ ID NO: 655 - protein, 84 aa, Homo Sapiens
VLTCLGSRDGKSPVRMAMPVEPRCLRLWTASYHQLVQLTSPCACLSRMSTKLVVLVLFLLAEWRLVFSNPVWWSPLLQSTLQRK

SEQ ID NO: 656 - protein, 83 aa, Homo Sapiens
VTCLGSRDGKSPVRMAMPVEPRCLRLWTASYHQLVQLTSPCACLSRMSTKLVVLVLFLLAEWRLVFSNPVWWSPLLQSTLQRK

SEQ ID NO: 657 - protein, 80 aa, Homo Sapiens
LGSRDGKSPVRMAMPVEPRCLRLWTASYHQLVQLTSPCACLSRMSTKLVVLVLFLLAEWRLVFSNPVWWSPLLQSTLQRK

SEQ ID NO: 658 - protein, 79 aa, Homo Sapiens
GSRDGKSPVRMAMPVEPRCLRLWTASYHQLVQLTSPCACLSRMSTKLVVLVLFLLAEWRLVFSNPVWWSPLLQSTLQRK

SEQ ID NO: 659 - protein, 77 aa, Homo Sapiens
RDGKSPVRMAMPVEPRCLRLWTASYHQLVQLTSPCACLSRMSTKLVVLVLFLLAEWRLVFSNPVWWSPLLQSTLQRK

SEQ ID NO: 660 - protein, 76 aa, Homo Sapiens
DGKSPVRMAMPVEPRCLRLWTASYHQLVQLTSPCACLSRMSTKLVVLVLFLLAEWRLVFSNPVWWSPLLQSTLQRK

SEQ ID NO: 661 - protein, 73 aa, Homo Sapiens
SPVRMAMPVEPRCLRLWTASYHQLVQLTSPCACLSRMSTKLVVLVLFLLAEWRLVFSNPVWWSPLLQSTLQRK

SEQ ID NO: 662 - protein, 71 aa, Homo Sapiens
VRMAMPVEPRCLRLWTASYHQLVQLTSPCACLSRMSTKLVVLVLFLLAEWRLVFSNPVWWSPLLQSTLQRK

SEQ ID NO: 663 - protein, 70 aa, Homo Sapiens
RMAMPVEPRCLRLWTASYHQLVQLTSPCACLSRMSTKLVVLVLFLLAEWRLVFSNPVWWSPLLQSTLQRK

SEQ ID NO: 664 - protein, 67 aa, Homo Sapiens
MPVEPRCLRLWTASYHQLVQLTSPCACLSRMSTKLVVLVLFLLAEWRLVFSNPVWWSPLLQSTLQRK

SEQ ID NO: 665 - protein, 67 aa, Homo Sapiens; identical to SEQ ID NO: 664

SEQ ID NO: 666 - protein, 62 aa, Homo Sapiens
RCLRLWTASYHQLVQLTSPCACLSRMSTKLVVLVLFLLAEWRLVFSNPVWWSPLLQSTLQRK

SEQ ID NO: 667 - protein, 59 aa, Homo Sapiens
RLWTASYHQLVQLTSPCACLSRMSTKLVVLVLFLLAEWRLVFSNPVWWSPLLQSTLQRK

SEQ ID NO: 668 - protein, 59 aa, Homo Sapiens; identical to SEQ ID NO: 667

SEQ ID NO: 669 - protein, 58 aa, Homo Sapiens
LWTASYHQLVQLTSPCACLSRMSTKLVVLVLFLLAEWRLVFSNPVWWSPLLQSTLQRK

SEQ ID NO: 670 - skipped

SEQ ID NO: 671 - protein, 11 aa, Homo Sapiens
RLISTLSSLDT

SEQ ID NO: 672 - protein, 51 aa, Homo Sapiens
QLVQLTSPCACLSRMSTKLVVLVLFLLAEWRLVFSNPVWWSPLLQSTLQRK

SEQ ID NO: 673 - protein, 50 aa, Homo Sapiens
IVQLTSPCACLSRMSTKLVVLVLFLLAEWRLVFSNPVWWSPLLQSTLQRK

SEQ ID NO: 674 - protein, 48 aa, Homo Sapiens
QLTSPCACLSRMSTKLVVLVLFLLAEWRLVFSNPVWWSPLLQSTLQRK

SEQ ID NO: 675 - protein, 45 aa, Homo Sapiens
SPCACLSRMSTKLVVLVLFLLAEWRLVFSNPVWWSPLLQSTLQRK

SEQ ID NO: 676 - protein, 43 aa, Homo Sapiens
CACLSRMSTKLVVLVLFLLAEWRLVFSNPVWWSPLLQSTLQRK

SEQ ID NO: 677 - protein, 43 aa, Homo Sapiens; identical to SEQ ID NO: 676

SEQ ID NO: 678 - protein, 41 aa, Homo Sapiens
CLSRMSTKLVVLVLFLLAEWRLVFSNPVWWSPLLQSTLQRK

SEQ ID NO: 679 - protein, 40 aa, Homo Sapiens
LSRMSTKLVVLVLFLLAEWRLVFSNPVWWSPLLQSTLQRK

SEQ ID NO: 680 - protein, 33 aa, Homo Sapiens
LVVLVLFLLAEWRLVFSNPVWWSPLLQSTLQRK

SEQ ID NO: 681 - protein, 33 aa, Homo Sapiens
MVVLVLFLLAEWRLVFSNPVWWSPLLQSTLQRK

SEQ ID NO: 682 - protein, 30 aa, Homo Sapiens
MVLFLLAEWRLVFSNPVWWSPLLQSTLQRK

SEQ ID NO: 683 - protein, 24 aa, Homo Sapiens
AEWRLVFSNPVWWSPLLQSTLQRK

SEQ ID NO: 684 - protein, 24 aa, Homo Sapiens
AEWRLVFSNPVWWSPLLQSTLQRK

SEQ ID NO: 685 - protein, 23 aa, Homo Sapiens
EWRLVFSNPVWWSPLLQSTLQRK

SEQ ID NO: 686 - protein, 9 aa, Homo Sapiens
LLQSTLQRK

SEQ ID NO: 687 - protein, 5 aa, Homo Sapiens
TLQRK

SEQ ID NO: 688 - protein, 6 aa, Homo Sapiens
MSSLDT

SEQ ID NO: 689 - protein, 9 aa, Homo Sapiens
NLSKCTMKL

SEQ ID NO: 690 - skipped

SEQ ID NO: 691 - protein, 38 aa, Homo Sapiens
TMWASMSRMCLSRMFVVATLLVTAKMTHQWKQLASLLR

SEQ ID NO: 692 - protein, 37 aa, Homo Sapiens
MWASMSRMCLSRMFVVATLLVTAKMTHQWKQLASLLR

SEQ ID NO: 693 - protein, 33 aa, Homo Sapiens
MSRMCLSRMFVVATLLVTAKMTHQWKQLASLLR

SEQ ID NO: 694 - protein, 18 aa, Homo Sapiens
GPCGTQSIASLKNSLRPS

SEQ ID NO: 695 - protein, 23 aa, Homo Sapiens
LEPTIAAPFLESGSSEARSLPFR

SEQ ID NO: 696 - protein, 71 aa, Homo Sapiens
GRWTTSHTHGGNWILAARRPRRWFESTFPGRGPSSMWAKPSIRARSSSEHLLPSPSCLHLPFREMGVIKGN

SEQ ID NO: 697 - protein, 45 aa, Homo Sapiens
DHPTSILAKPTAPLNFSANFLPARSQHLRVMMDSVCLRATPLPTM

SEQ ID NO: 698 - protein, 44 aa, Homo Sapiens
HPTSILAKPTAPLNFSANFLPARSQHLRVMMDSVCLRATPLPTM

SEQ ID NO: 699 - protein, 42 aa, Homo Sapiens
TSILAKPTAPLNFSANFLPARSQHLRVMMDSVCLRATPLPTM

SEQ ID NO: 700 - protein, 39 aa, Homo Sapiens
LAKPTAPLNFSANFLPARSQHLRVMMDSVCLRATPLPTM

SEQ ID NO: 701 - protein, 18 aa, Homo Sapiens
LRVMMDSVCLRATPLPTM

SEQ ID NO: 702 - protein, 9 aa, Homo Sapiens
LRATPLPTM

SEQ ID NO: 703 - protein, 4 aa, Homo Sapiens
MPTM

SEQ ID NO: 704 - protein, 5 aa, Homo Sapiens
LLIPI

SEQ ID NO: 705 - protein, 12 aa, Homo Sapiens
QTNRPLRMQRRK

SEQ ID NO: 706 - protein, 11 aa, Homo Sapiens
KNRPLRMQRRK

SEQ ID NO: 707 - protein, 5 aa, Homo Sapiens
WWANE

SEQ ID NO: 708 - protein, 17 aa, Homo Sapiens
WLTSQLSAPCCGSISRF

SEQ ID NO: 709 - protein, 16 aa, Homo Sapiens
VTSQLSAPCCGSISRF

SEQ ID NO: 710 - protein, 11 aa, Homo Sapiens
SAPCCGSISRF

SEQ ID NO: 711 - protein, 7 aa, Homo Sapiens
CGSISRF

SEQ ID NO: 712 - protein, 25 aa, Homo Sapiens
RPFPIPTAGSSPALTSPSSGLSWAK

SEQ ID NO: 713 - protein, 21 aa, Homo Sapiens
IPTAGSSPALTSPSSGLSWAK

SEQ ID NO: 714 - protein, 18 aa, Homo Sapiens
AGSSPALTSPSSGLSWAK

SEQ ID NO: 715 - protein, 17 aa, Homo Sapiens
GSSPALTSPSSGLSWAK

SEQ ID NO: 716 - protein, 17 aa, Homo Sapiens
CSSPALTSPSSGLSWAK

SEQ ID NO: 717 - skipped

SEQ ID NO: 718 - protein, 8 aa, Homo Sapiens
SSGLSWAK

SEQ ID NO: 719 - protein, 3 aa, Homo Sapiens
WAK

SEQ ID NO: 720 - protein, 129 aa, Homo Sapiens
NCVRRWPSLMLKSLQRPNLKRTHHGKRRVHGKRSRSPRLSGRRRKRRLPLLLRRRWMNVSRRWLLSPRPRTPSLTCPRVPLCWMNLSASTPMRTHSLWHCHISGSTLIRTAGPCGTQSIASLKNSLRPS

SEQ ID NO: 721 - protein, 122 aa, Homo Sapiens
SLMLKSLQRPNLKRTHHGKRRVHGKRSRSPRLSGRRRKRRLPLLLRRRWMNVSRRWLLSPRPRTPSLTCPRVPLCWMNLSASTPMRTHSLWHCHISGSTLIRTAGPCGTQSIASLKNSLRPS

SEQ ID NO: 722 - protein, 121 aa, Homo Sapiens
LMLKSLQRPNLKRTHHGKRRVHGKRSRSPRLSGRRRKRRLPLLLRRRWMNVSRRWLLSPRPRTPSLTCPRVPLCWMNLSASTPMRTHSLWHCHISGSTLIRTAGPCGTQSIASLKNSLRPS

SEQ ID NO: 723 - protein, 116 aa, Homo Sapiens
LQRPNLKRTHHGKRRVHGKRSRSPRLSGRRRKRRLPLLLRRRWMNVSRRWLLSPRPRTPSLTCPRVPLCWMNLSASTPMRTHSLWHCHISGSTLIRTAGPCGTQSIASLKNSLRPS

SEQ ID NO: 724 - protein, 111 aa, Homo Sapiens
LKRTHHGKRRVHGKRSRSPRLSGRRRKRRLPLLLRRRWMNVSRRWLLSPRPRTPSLTCPRVPLCWMNLSASTPMRTHSLWHCHISGSTLIRTAGPCGTQSIASLKNSLRPS

SEQ ID NO: 725 - protein, 106 aa, Homo Sapiens
HGKRRVHGKRSRSPRLSGRRRKRRLPLLLRRRWMNVSRRWLLSPRPRTPSLTCPRVPLCWMNLSASTPMRTHSLWHCHISGSTLIRTAGPCGTQSIASLKNSLRPS

SEQ ID NO: 726 - protein, 100 aa, Homo Sapiens
HGKRSRSPRLSGRRRKRRLPLLLRRRWMNVSRRWLLSPRPRTPSLTCPRVPLCWMNLSASTPMRTHSLWHCHISGSTLIRTAGPCGTQSIASLKNSLRPS

SEQ ID NO: 727 - protein, 92 aa, Homo Sapiens
RLSGRRRKRRLPLLLRRRWMNVSRRWLLSPRPRTPSLTCPRVPLCWMNLSASTPMRTHSLWHCHISGSTLIRTAGPCGTQSIASLKNSLRPS

SEQ ID NO: 728 - protein, 60 aa, Homo Sapiens
RTPSLTCPRVPLCWMNLSASTPMRTHSLWHCHISGSTLIRTAGPCGTQSIASLKNSLRPS

SEQ ID NO: 729 - skipped

SEQ ID NO: 730 - protein, 7 aa, Homo Sapiens
MLTALMT

SEQ ID NO: 731 - protein, 3 aa, Homo Sapiens
LMT

SEQ ID NO: 732 - protein, 23 aa, Homo Sapiens
MLKPNLGLGKRPHLPYRFCSRLN

SEQ ID NO: 733 - protein, 11 aa, Homo Sapiens
HLPYRFCSRLN

SEQ ID NO: 734 - protein, 10 aa, Homo Sapiens
LPYRFCSRLN

SEQ ID NO: 735 - protein, 2 aa, Homo Sapiens
WS

SEQ ID NO: 736 - protein, 11 aa, Homo Sapiens
WLSRYRRWSWH

SEQ ID NO: 737 - protein, 27 aa, Homo Sapiens
VCLICLTGDTCPPNTSRCLYWMKLTKC

SEQ ID NO: 738 - protein, 9 aa, Homo Sapiens
LYWMKLTKC

SEQ ID NO: 739 - protein, 1 aa, Homo Sapiens
R

SEQ ID NO: 740 - protein, 12 aa, Homo Sapiens
CCQPQCLLMCLR

SEQ ID NO: 741 - protein, 8 aa, Homo Sapiens
QCLLMCLR

SEQ ID NO: 742 - protein, 5 aa, Homo Sapiens
SRRKS

SEQ ID NO: 743 - protein, 22 aa, Homo Sapiens
SSTSTWNERSGSWTHYVTCMKP

SEQ ID NO: 744 - protein, 15 aa, Homo Sapiens
LVMLNLRTWIPCSVP

SEQ ID NO: 745 - protein, 8 aa, Homo Sapiens
LERWEASL

SEQ ID NO: 746 - skipped

SEQ ID NO: 747 - protein, 5 aa, Homo Sapiens
WKERD

SEQ ID NO: 748 - protein, 2 aa, Homo Sapiens
DL

SEQ ID NO: 749 - protein, 1 aa, Homo Sapiens
L

SEQ ID NO: 750 - protein, 3 aa, Homo Sapiens
CSR

SEQ ID NO: 751 - protein, 7 aa, Homo Sapiens
QRGSPRP

SEQ ID NO: 752 - protein, 37 aa, Homo Sapiens
RSLTLAGIPLLRLISSPQKVSSELLCPVVLQLVSMRP

SEQ ID NO: 753 - protein, 35 aa, Homo Sapiens
LTLAGIPLLRLISSPQKVSSELLCPVVLQLVSMRP

SEQ ID NO: 754 - protein, 26 aa, Homo Sapiens
RLISSPQKVSSELLCPVVLQLVSMRP

SEQ ID NO: 755 - protein, 15 aa, Homo Sapiens
STSIKLLRLPWLARN

SEQ ID NO: 756 - protein, 9 aa, Homo Sapiens
MRLPWLARN

SEQ ID NO: 757 - protein, 5 aa, Homo Sapiens
WLARN

SEQ ID NO: 758 - protein, 3 aa, Homo Sapiens
MTN

SEQ ID NO: 759 - protein, 63 aa, Homo Sapiens
LVRTPFWGCPLPSAKLVPLRRGSPCTATSLTWLATLKSSCQSRRSMSSMAVLMLATSWPCRSS

SEQ ID NO: 760 - protein, 36 aa, Homo Sapiens
TSLTWLATLKSSCQSRRSMSSMAVLMLATSWPCRSS

SEQ ID NO: 761 - protein, 31 aa, Homo Sapiens
VATLKSSCQSRRSMSSMAVLMLATSWPCRSS

SEQ ID NO: 762 - protein, 19 aa, Homo Sapiens
SMSSMAVLMLATSWPCRSS

SEQ ID NO: 763 - protein, 8 aa, Homo Sapiens
TSWPCRSS

SEQ ID NO: 764 - protein, 8 aa, Homo Sapiens
TSWPCRSS

SEQ ID NO: 765 - protein, 4 aa, Homo Sapiens
CRSS

SEQ ID NO: 766 - protein, 15 aa, Homo Sapiens
TSGKPCALEQRFTTT

SEQ ID NO: 767 - protein, 8 aa, Homo Sapiens
MEQRFTTT

SEQ ID NO: 768 - skipped

SEQ ID NO: 769 - protein, 15 aa, Homo Sapiens
MGKLATLIRWSSAWT

SEQ ID NO: 770 - protein, 66 aa, Homo Sapiens
PSSSGLGSMTWTSSLPMTPAGTSRLTSWLTCTSPSSRTTQWCLSKIPLTRMTGELGRSSQPVQESR

SEQ ID NO: 771 - protein, 2 aa, Homo Sapiens
LT

SEQ ID NO: 772 - protein, 26 aa, Homo Sapiens
MAMTVPKPAGPGPKPVISEIQASSLT

SEQ ID NO: 773 - protein, 17 aa, Homo Sapiens
GPGPKPVISEIQASSLT

SEQ ID NO: 774 - protein, 15 aa, Homo Sapiens
GPKPVISEIQASSLT

SEQ ID NO: 775 - protein, 12 aa, Homo Sapiens
LTYPCSTEISSA

SEQ ID NO: 776 - protein, 27 aa, Homo Sapiens
CFCLAIPRGLRSMGVVRLYWRKRKQKS

SEQ ID NO: 777 - protein, 2 aa, Homo Sapiens
ML

SEQ ID NO: 778 - protein, 44 aa, Homo Sapiens
LLASVTSWYQKTWEQKARSLFPAHMMPPLILRQRVMTLKTSIRG

SEQ ID NO: 779 - protein, 22 aa, Homo Sapiens
LSIRVEKSTRFLPLKQKPWHLA

SEQ ID NO: 780 - protein, 10 aa, Homo Sapiens
CLKNVASGNS

SEQ ID NO: 781 - protein, 78 aa, Homo Sapiens
ASSSTPFSARTSALPFWVGGRPGLMTQVSWDQTSMPGTFPPLTSTPRSDGRWSCTSWWAPPVQLSARTWLSSSARLGS

SEQ ID NO: 782 - protein, 10 aa, Homo Sapiens
WCQRFKEPSP

SEQ ID NO: 783 - protein, 9 aa, Homo Sapiens
WTFLVIPTW

SEQ ID NO: 784 - protein, 17 aa, Homo Sapiens
LLWMYTKTFILMIFLML

SEQ ID NO: 785 - skipped

SEQ ID NO: 786 - protein, 1 aa, Homo Sapiens
M

SEQ ID NO: 787 - protein, 33 aa, Homo Sapiens
LKIQKLQGKCSQPGMVGCSLTTWRTSMVLGRNI

SEQ ID NO: 788 - protein, 19 aa, Homo Sapiens
MVGCSLTTWRTSMVLGRNI

SEQ ID NO: 789 - protein, 14 aa, Homo Sapiens
LTTWRTSMVLGRNI

SEQ ID NO: 790 - protein, 3 aa, Homo Sapiens
LKS

SEQ ID NO: 791 - protein, 10 aa, Homo Sapiens
GMQPWKTLHG

SEQ ID NO: 792 - protein, 43 aa, Homo Sapiens
SFTGLCLFSSITPKVAIILLTSSFISHNILMQFRQCVHTFFAI

SEQ ID NO: 793 - protein, 37 aa, Homo Sapiens
LFSSITPKVAIILLTSSFISHNILMQFRQCVHTFFAI

SEQ ID NO: 794 - protein, 4 aa, Homo Sapiens
WIGI

SEQ ID NO: 795 - protein, 17 aa, Homo Sapiens
LLNVYMLTLTLMGLRKS

SEQ ID NO: 796 - protein, 14 aa, Homo Sapiens
TGCRRRSPPWRPAP

SEQ ID NO: 797 - protein, 5 aa, Homo Sapiens
WRPAP

SEQ ID NO: 798 - protein, 55 aa, Homo Sapiens
MTMAPACAKLVLLGTTLPEPCFLPSSGAPDTRASWWAWARRTPTWATRPRASVAS

SEQ ID NO: 799 - protein, 41 aa, Homo Sapiens
HCPPSSRCGLASRSTTSRAPPSSTANASKRTQQMRSICCMG

SEQ ID NO: 800 - protein, 21 aa, Homo Sapiens
PSSTANASKRTQQMRSICCMG

SEQ ID NO: 801 - protein, 16 aa, Homo Sapiens
NASKRTQQMRSICCMG

SEQ ID NO: 802 - protein, 44 aa, Homo Sapiens
LLGTTLPEPCFLPSSGAPDTRASWWAWARRTPTWATRPRASVAS

SEQ ID NO: 803 - protein, 35 aa, Homo Sapiens
GFLPSSGAPDTRASWWAWARRTPTWATRPRASVAS

SEQ ID NO: 804 - protein, 23 aa, Homo Sapiens
ASWWAWARRTPTWATRPRASVAS

SEQ ID NO: 805 - protein, 6 aa, Homo Sapiens
RASVAS

SEQ ID NO: 806 - protein, 7 aa, Homo Sapiens
RRSTQCC

SEQ ID NO: 807 - skipped

SEQ ID NO: 808 - protein, 4 aa, Homo Sapiens
TERR

SEQ ID NO: 809 - protein, 61 aa, Homo Sapiens
LRPSTPRPCTWPSRPCCPSTPLGAPLALSWTLETGSPTRCPSTRATPSPTPSCVWTWLAGT

SEQ ID NO: 810 - protein, 53 aa, Homo Sapiens
CTWPSRPCCPSTPLGAPLALSWTLETGSPTRCPSTRATPSPTPSCVWTWLAGT

SEQ ID NO: 811 - protein, 49 aa, Homo Sapiens
SRPCCPSTPLGAPLALSWTLETGSPTRCPSTRATPSPTPSCVWTWLAGT

SEQ ID NO: 812 - protein, 46 aa, Homo Sapiens
CCPSTPLGAPLALSWTLETGSPTRCPSTRATPSPTPSCVWTWLAGT

SEQ ID NO: 813 - protein, 36 aa, Homo Sapiens
LALSWTLETGSPTRCPSTRATPSPTPSCVWTWLAGT

SEQ ID NO: 814 - protein, 34 aa, Homo Sapiens
MSWTLETGSPTRCPSTRATPSPTPSCVWTWLAGT

SEQ ID NO: 815 - protein, 24 aa, Homo Sapiens
TRCPSTRATPSPTPSCVWTWLAGT

SEQ ID NO: 816 - protein, 20 aa, Homo Sapiens
STRATPSPTPSCVWTWLAGT

SEQ ID NO: 817 - protein, 12 aa, Homo Sapiens
QPSCVWTWLAGT

SEQ ID NO: 818 - protein, 4 aa, Homo Sapiens
VAGT

SEQ ID NO: 819 - protein, 2 aa, Homo Sapiens
GT

SEQ ID NO: 820 - skipped

SEQ ID NO: 821 - protein, 3 aa, Homo Sapiens
TTS

SEQ ID NO: 822 - protein, 2 aa, Homo Sapiens
TS

SEQ ID NO: 823 - protein, 1 aa, Homo Sapiens
S

SEQ ID NO: 824 - protein, 90 aa, Homo Sapiens
SLSEATASPPRPSGKSCATSRRSCATSPWTSSRRWPPPHPPLLWRRATSCPMARSSPLAMSGSGVRRRCSSLPSWVWNLAASTRPPSTPS

SEQ ID NO: 825 - protein, 85 aa, Homo Sapiens
TASPPRPSGKSCATSRRSCATSPWTSSRRWPPPHPPLLWRRATSCPMARSSPLAMSGSGVRRRCSSLPSWVWNLAASTRPPSTPS

SEQ ID NO: 826 - protein, 83 aa, Homo Sapiens
SPPRPSGKSCATSRRSCATSPWTSSRRWPPPHPPLLWRRATSCPMARSSPLAMSGSGVRRRCSSLPSWVWNLAASTRPPSTPS

SEQ ID NO: 827 - protein, 78 aa, Homo Sapiens
SGKSCATSRRSCATSPWTSSRRWPPPHPPLLWRRATSCPMARSSPLAMSGSGVRRRCSSLPSWVWNLAASTRPPSTPS

SEQ ID NO: 828 - protein, 72 aa, Homo Sapiens
ESRRSCATSPWTSSRRWPPPHPPLLWRRATSCPMARSSPLAMSGSGVRRRCSSLPSWVWNLAASTRPPSTPS

SEQ ID NO: 829 - protein, 70 aa, Homo Sapiens
RRSCATSPWTSSRRWPPPHPPLLWRRATSCPMARSSPLAMSGSGVRRRCSSLPSWVWNLAASTRPPSTPS

SEQ ID NO: 830 - protein, 62 aa, Homo Sapiens
WTSSRRWPPPHPPLLWRRATSCPMARSSPLAMSGSGVRRRCSSLPSWVWNLAASTRPPSTPS

SEQ ID NO: 831 - protein, 64 aa, Homo Sapiens [sequence omitted]

SEQ ID NO: 832 - protein, 52 aa, Homo Sapiens
DPPLLWRRATSCPMARSSPLAMSGSGVRRRCSSLPSWVWNLAASTRPPSTPS

SEQ ID NO: 833 - protein, 45 aa, Homo Sapiens
RATSCPMARSSPLAMSGSGVRRRCSSLPSWVWNLAASTRPPSTPS

SEQ ID NO: 834 - protein, 39 aa, Homo Sapiens
MARSSPLAMSGSGVRRRCSSLPSWVWNLAASTRPPSTPS

SEQ ID NO: 835 - protein, 33 aa, Homo Sapiens
MAMSGSGVRRRCSSLPSWVWNLAASTRPPSTPS

SEQ ID NO: 836 - protein, 31 aa, Homo Sapiens
MSGSGVRRRCSSLPSWVWNLAASTRPPSTPS

SEQ ID NO: 837 - protein, 28 aa, Homo Sapiens
SGVRRRCSSLPSWVWNLAASTRPPSTPS

SEQ ID NO: 838 - protein, 9 aa, Homo Sapiens
STRPPSTPS

SEQ ID NO: 839 - protein, 5 aa, Homo Sapiens
PSTPS

SEQ ID NO: 840 - protein, 3 aa, Homo Sapiens
TPS

SEQ ID NO: 841 - protein, 22 aa, Homo Sapiens
PPCTRALPTGCRRRSPPWRPAP

SEQ ID NO: 842 - protein, 1 aa, Homo Sapiens
R

SEQ ID NO: 843 - protein, 9 aa, Homo Sapiens
WKSWWMKGW

SEQ ID NO: 844 - protein, 6 aa, Homo Sapiens
SPKASW

SEQ ID NO: 845 - protein, 39 aa, Homo Sapiens
TAPSALLTGPGPSPRTLLSWRIPGSRRSQPSTIKLQPRS

SEQ ID NO: 846 - protein, 34 aa, Homo Sapiens
LLTGPGPSPRTLLSWRIPGSRRSQPSTIKLQPRS

SEQ ID NO: 847 - protein, 51 aa, Homo Sapiens
QRKMTKRQQERAQPCMRTPQIRKPHPVANLPHSRSALGMWMGFEPGLRRKD

SEQ ID NO: 848 - protein, 1 aa, Homo Sapiens
G

SEQ ID NO: 849 - protein, 30 aa, Homo Sapiens
LAKKKCASSWWAWMLQGRPRSSTSLSWVRS

SEQ ID NO: 850 - protein, 69 aa, Homo Sapiens
RSQTSWGCTHYATGTGTFRPPAPPAATGSMKDWTGCPISSGTRSERDPPPSHSSCPLLYSHVANVRLVV

SEQ ID NO: 851 - protein, 8 aa, Homo Sapiens
LARSRCAF

SEQ ID NO: 852 - skipped

SEQ ID NO: 853 - protein, 7 aa, Homo Sapiens
MVLMWKQ

SEQ ID NO: 854 - protein, 23 aa, Homo Sapiens
VVKIELGLSGSITSRIPRVLFLW

SEQ ID NO: 855 - protein, 2 aa, Homo Sapiens
LW

SEQ ID NO: 856 - protein, 15 aa, Homo Sapiens
LQTNRICQMLWPSVK

SEQ ID NO: 857 - protein, 13 aa, Homo Sapiens
MLVMEPVERHACS

SEQ ID NO: 858 - protein, 11 aa, Homo Sapiens
VMEPVERHACS

SEQ ID NO: 859 - protein, 14 aa, Homo Sapiens
LRTMWQISRWMESR

SEQ ID NO: 860 - protein, 12 aa, Homo Sapiens
CGTQLGRKIMIA

SEQ ID NO: 861 - protein, 3 aa, Homo Sapiens
LIV

SEQ ID NO: 862 - protein, 13 aa, Homo Sapiens
LGTWSVQQRPKME

SEQ ID NO: 863 - protein, 5 aa, Homo Sapiens
ISQKV

SEQ ID NO: 864 - protein, 11 aa, Homo Sapiens
SCPPLQIIPLV

SEQ ID NO: 865 - protein, 30 aa, Homo Sapiens
LTWVLCRKELPLPRRDLSPLYRLSMCLLMT

SEQ ID NO: 866 - protein, 74 aa, Homo Sapiens
WQVNMTISQNRPSIWWDPLKKLWQKLISWLKSIHREGSLSSVLSLSLPLTQKASFFCVGCTRALIEDIFFLNSI

SEQ ID NO: 867 - protein, 55 aa, Homo Sapiens
QLSSYCGPLRRRSILSGTMRRKHLLRQKQAPPPGASWRSLAQWWTSSLMRDYHQF

SEQ ID NO: 868 - protein, 23 aa, Homo Sapiens
PGASWRSLAQWWTSSLMRDYHQF

SEQ ID NO: 869 - protein, 16 aa, Homo Sapiens
MAQWWTSSLMRDYHQF

SEQ ID NO: 870 - protein, 8 aa, Homo Sapiens
LMRDYHQF

SEQ ID NO: 871 - protein, 16 aa, Homo Sapiens
RPDWFWRWPSIWVRAQ

SEQ ID NO: 872 - protein, 11 aa, Homo Sapiens
WRWPSIWVRAQ

SEQ ID NO: 873 - protein, 34 aa, Homo Sapiens
MLWMVQKAWLEARKYWILVHQSKFLLVLRLWAES

SEQ ID NO: 874 - protein, 8 aa, Homo Sapiens
VLRLWAES

SEQ ID NO: 875 - protein, 15 aa, Homo Sapiens
NNLLPFMLRLQSSWK

SEQ ID NO: 876 - skipped

SEQ ID NO: 877 - protein, 10 aa, Homo Sapiens
LVVLELARLY

SEQ ID NO: 878 - protein, 5 aa, Homo Sapiens
QRPPL

SEQ ID NO: 879 - protein, 31 aa, Homo Sapiens
YCRQQGPFIQGSHTLSLYHLFLNTEEKFVMD

SEQ ID NO: 880 - protein, 12 aa, Homo Sapiens
LLINSMSKNLPN

SEQ ID NO: 881 - protein, 15 aa, Homo Sapiens
WKLLTGNDCIEYIRK

SEQ ID NO: 882 - protein, 13 aa, Homo Sapiens
LAALSLVMPETLR

SEQ ID NO: 883 - protein, 26 aa, Homo Sapiens
CLPCNKLLLDMLAFILITDVILCILL

SEQ ID NO: 884 - protein, 8 aa, Homo Sapiens
LTKMVMEL

SEQ ID NO: 885 - protein, 3 aa, Homo Sapiens
WEL

SEQ ID NO: 886 - protein, 10 aa, Homo Sapiens
RIPQKQSYRT

SEQ ID NO: 887 - protein, 6 aa, Homo Sapiens
MTSLNF

SEQ ID NO: 888 - protein, 16 aa, Homo Sapiens
LIRMAMAILVLQNFAM

SEQ ID NO: 889 - protein, 9 aa, Homo Sapiens
ILVLQNFAM

SEQ ID NO: 890 - protein, 3 aa, Homo Sapiens
ERS

SEQ ID NO: 891 - protein, 3 aa, Homo Sapiens
ERS

SEQ ID NO: 892 - protein, 2 aa, Homo Sapiens
MK

SEQ ID NO: 893 - protein, 6 aa, Homo Sapiens
MMVMVK

SEQ ID NO: 894 - protein, 6 aa, Homo Sapiens
MKSLYK

SEQ ID NO: 895 - protein, 3 aa, Homo Sapiens
LYK

SEQ ID NO: 896 - protein, 24 aa, Homo Sapiens [sequence omitted]

SEQ ID NO: 897 - protein, 23 aa, Homo Sapiens
SEDLVQNVLNFLYKIVYLPFLCL

SEQ ID NO: 898 - protein, 3 aa, Homo Sapiens
VTN

SEQ ID NO: 899 - protein, 18 aa, Homo Sapiens
MQNSKKLFHYLTKMVMEL

SEQ ID NO: 900 - protein, 9 aa, Homo Sapiens
ASSSRGTPT

SEQ ID NO: 901 - protein, 5 aa, Homo Sapiens
WKKSK

SEQ ID NO: 902 - protein, 4 aa, Homo Sapiens
MCWW

SEQ ID NO: 903 - protein, 9 aa, Homo Sapiens
WELSLPAAS

SEQ ID NO: 904 - protein, 28 aa, Homo Sapiens [sequence omitted]

SEQ ID NO: 905 - protein, 5 aa, Homo Sapiens
NQRQS

SEQ ID NO: 906 - protein, 2 aa, Homo Sapiens
AS

SEQ ID NO: 907 - protein, 3 aa, Homo Sapiens
YLA

SEQ ID NO: 908 - protein, 19 aa, Homo Sapiens
SRKALTKSGWPSRPRGCWT

SEQ ID NO: 909 - protein, 1 aa, Homo Sapiens
A

SEQ ID NO: 910 - protein, 37 aa, Homo Sapiens; identical to SEQ ID NO: 11

SEQ ID NO: 911 - protein, 27 aa, Homo Sapiens
TCVDSSAKLSWTTFQILSWKPMFHFWY

SEQ ID NO: 912 - protein, 74 aa, Homo Sapiens
APVAPAGPSGLWKPSLTGSASTPMRTSAWRCRRRTCSHAVAACVGTAVMVAILLKLGTSGQEKAWFLVASMNPM

SEQ ID NO: 913 - protein, 22 aa, Homo Sapiens
LVPLERIKIYAKNRKQEVIPFS

SEQ ID NO: 914 - protein, 28 aa, Homo Sapiens
MPVWKWRTRVCVAWYRSCSRPSPSWRPG

SEQ ID NO: 915 - protein, 157 aa, Homo Sapiens
HRPSTYLPCAKWSPQPRSQPHQQRMTRMMTLTCLAVTMRRRTRRRHSCGRSGYGSTRRRRPRSLHWWPSPPSCWMSSLGMMRRTWPSWRPVCALSSWTGWSGGLPSWCPWATVSGSYRFSVWWRTTRWGQTCWRRRSPSLRSTCRVSISQLSTRSEA

SEQ ID NO: 916 - protein, 36 aa, Homo Sapiens
GPGRHASLIPGRTSRSVASPSSQLPSPSSTSSRRMT

SEQ ID NO: 917 - protein, 20 aa, Homo Sapiens
LRSLPLFSRELLFPVLKGMM

SEQ ID NO: 918 - protein, 3 aa, Homo Sapiens
LIC

SEQ ID NO: 919 - skipped

SEQ ID NO: 920 - protein, 12 aa, Homo Sapiens
GLCTTISSCLVI

SEQ ID NO: 921 - protein, 1 aa, Homo Sapiens
G

SEQ ID NO: 922 - protein, 25 aa, Homo Sapiens
MENLLMTTVMMYVALLLMLELKVIR

SEQ ID NO: 923 - protein, 104 aa, Homo Sapiens
PPLKIGLLFKKTPSEYSHRRLRQAIEIWELNQSLFKKQSGLHLNLISILMLLRYKRSLIRLCLVLLCSFFFFFLARVSTIPIKELQYTSPESINVFLAHSVIVQ

SEQ ID NO: 924 - protein, 61 aa, Homo Sapiens
LWCSKAGHVRSSRCLLRRLASTATPRSIWLVLTSLLGRNMKISARQLIIWMSPTSKGMTSS

SEQ ID NO: 925 - protein, 2 aa, Homo Sapiens
TS

SEQ ID NO: 926 - protein, 20 aa, Homo Sapiens
MPGSRRSWSTMPLEASITGV

SEQ ID NO: 927 - protein, 17 aa, Homo Sapiens
WMPSMMLTSWKHVSTAC

SEQ ID NO: 928 - protein, 1 aa, Homo Sapiens
C

SEQ ID NO: 929 - protein, 30 aa, Homo Sapiens
RAMWILSDSLKRGTNLLSSTRQLSTPSTFL

SEQ ID NO: 930 - protein, 29 aa, Homo Sapiens
AMWILSDSLKRGTNLLSSTRQLSTPSTFL

SEQ ID NO: 931 - protein, 67 aa, Homo Sapiens
MPSTTTLSSSFPGMTTNLATATGWWTSWPTWPPRSKTPGPPAPARAQEEERDPHCWGVPATLSPPPH

SEQ ID NO: 932 - protein, 38 aa, Homo Sapiens
TWPPRSKTPGPPAPARAQEEERDPHCWGVPATLSPPPH

SEQ ID NO: 933 - protein, 124 aa, Homo Sapiens
LVVLGAWSPGLLLTLVKWILLPSMTPSLTSTTWFTCSNMIPPMANSMAPSRLRTGSLSSMEIPSPSSRSEIPPKSSGAMLALSTSWSPLASSPPWRRLGLICRGEPKGSSSLPPLLMPPCSSWV

SEQ ID NO: 934 - protein, 121 aa, Homo Sapiens
MGAWSPGLLLTLVKWILLPSMTPSLTSTTWFTCSNMIPPMANSMAPSRLRTGSLSSMEIPSPSSRSEIPPKSSGAMLALSTSWSPLASSPPWRRLGLICRGEPKGSSSLPPLLMPPCSSWV

SEQ ID NO: 935 - protein, 114 aa, Homo Sapiens
LLLTLVKWILLPSMTPSLTSTTWFTCSNMIPPMANSMAPSRLRTGSLSSMEIPSPSSRSEIPPKSSGAMLALSTSWSPLASSPPWRRLGLICRGEPKGSSSLPPLLMPPCSSWV

SEQ ID NO: 936 - protein, 105 aa, Homo Sapiens
MLPSMTPSLTSTTWFTCSNMIPPMANSMAPSRLRTGSLSSMEIPSPSSRSEIPPKSSGAMLALSTSWSPLASSPPWRRLGLICRGEPKGSSSLPPLLMPPCSSWV

SEQ ID NO: 937 - protein, 103 aa, Homo Sapiens
PSMTPSLTSTTWFTCSNMIPPMANSMAPSRLRTGSLSSMEIPSPSSRSEIPPKSSGAMLALSTSWSPLASSPPWRRLGLICRGEPKGSSSLPPLLMPPCSSWV

SEQ ID NO: 938 - protein, 97 aa, Homo Sapiens
MTSTTWFTCSNMIPPMANSMAPSRLRTGSLSSMEIPSPSSRSEIPPKSSGAMLALSTSWSPLASSPPWRRLGLICRGEPKGSSSLPPLLMPPCSSWV

SEQ ID NO: 939 - protein, 67 aa, Homo Sapiens
SSMEIPSPSSRSEIPPKSSGAMLALSTSWSPLASSPPWRRLGLICRGEPKGSSSLPPLLMPPCSSWV

SEQ ID NO: 940 - protein, 13 aa, Homo Sapiens
SRSSAMPPAPPTA

SEQ ID NO: 941 - protein, 3 aa, Homo Sapiens
PTA

SEQ ID NO: 942 - protein, 2 aa, Homo Sapiens
TA

SEQ ID NO: 943 - skipped

SEQ ID NO: 944 - protein, 13 aa, Homo Sapiens
RSSMTTLVSWKDS

SEQ ID NO: 945 - protein, 7 aa, Homo Sapiens
LVSWKDS

SEQ ID NO: 946 - protein, 47 aa, Homo Sapiens
QSMPSLPPRRLWMAPPGNCGVMAAGLSRTSSLPLLALPRLWARSSLS

SEQ ID NO: 947 - protein, 40 aa, Homo Sapiens
PRRLWMAPPGNCGVMAAGLSRTSSLPLLALPRLWARSSLS

SEQ ID NO: 948 - protein, 39 aa, Homo Sapiens
RRLWMAPPGNCGVMAAGLSRTSSLPLLALPRLWARSSLS

SEQ ID NO: 949 - protein, 32 aa, Homo Sapiens
PGNCGVMAAGLSRTSSLPLLALPRLWARSSLS

SEQ ID NO: 950 - protein, 24 aa, Homo Sapiens
AGLSRTSSLPLLALPRLWARSSLS

SEQ ID NO: 951 - protein, 22 aa, Homo Sapiens
LSRTSSLPLLALPRLWARSSLS

SEQ ID NO: 952 - protein, 22 aa, Homo Sapiens
LSRTSSLPLLALPRLWARSSLS

SEQ ID NO: 953 - protein, 22 aa, Homo Sapiens
VSRTSSLPLLALPRLWARSSLS

SEQ ID NO: 954 - protein, 16 aa, Homo Sapiens
LPLLALPRLWARSSLS

SEQ ID NO: 955 - protein, 14 aa, Homo Sapiens
LLALPRLWARSSLS

SEQ ID NO: 956 - protein, 9 aa, Homo Sapiens
RLWARSSLS

SEQ ID NO: 957 - protein, 5 aa, Homo Sapiens
RSSLS

SEQ ID NO: 958 - protein, 4 aa, Homo Sapiens
SSLS

SEQ ID NO: 959 - protein, 2 aa, Homo Sapiens
LS

SEQ ID NO: 960 - protein, 20 aa, Homo Sapiens
TGSSLAWPSVSPLPTCQWWT

SEQ ID NO: 961 - protein, 12 aa, Homo Sapiens
SVSPLPTCQWWT

SEQ ID NO: 962 - protein, 8 aa, Homo Sapiens
LPTCQWWT

SEQ ID NO: 963 - protein, 11 aa, Homo Sapiens
NLPNMMTSRRW

SEQ ID NO: 964 - protein, 10 aa, Homo Sapiens
LPNMMTSRRW

SEQ ID NO: 965 - protein, 2 aa, Homo Sapiens
CQ

SEQ ID NO: 966 - protein, 50 aa, Homo Sapiens
SPGSPPPSTRASPPRPLPEPAPGGPMWKWDLQIPFWESLKPLRGTPIAKR

SEQ ID NO: 967 - protein, 43 aa, Homo Sapiens
STRASPPRPLPEPAPGGPMWKWDLQIPFWESLKPLRGTPIAKR

SEQ ID NO: 968 - protein, 4 aa, Homo Sapiens
ATRV

SEQ ID NO: 969 - protein, 35 aa, Homo Sapiens
ASVVLIGATAVLLASAAQPGVPSVCAGRPRAGTPL

SEQ ID NO: 970 - protein, 15 aa, Homo Sapiens
VPSVCAGRPRAGTPL

SEQ ID NO: 971 - protein, 82 aa, Homo Sapiens
WFTPAASHPRAPTPWQRSSLPRGLTGQWPCPARSCVRTHGPGALMVLPAVSCPVGSMAAAQCPTPPAAPITCTAAPKTLCVT

SEQ ID NO: 972 - protein, 68 aa, Homo Sapiens
WQRSSLPRGLTGQWPCPARSCVRTHGPGALMVLPAVSCPVGSMAAAQCPTPPAAPITCTAAPKTLCVT

SEQ ID NO: 973 - protein, 39 aa, Homo Sapiens
LMVLPAVSCPVGSMAAAQCPTPPAAPITCTAAPKTLCVT

SEQ ID NO: 974 - protein, 19 aa, Homo Sapiens
SWSTSPQRYLNWQEMHQKT

SEQ ID NO: 975 - protein, 21 aa, Homo Sapiens
WILSSRLQLLVVVSFHTSTNL

SEQ ID NO: 976 - protein, 30 aa, Homo Sapiens
ALMCPSQLVKCETAALCGTERQELFLPFPL

SEQ ID NO: 977 - protein, 5 aa, Homo Sapiens
MRRSS

SEQ ID NO: 978 - protein, 5 aa, Homo Sapiens
VRRSS

SEQ ID NO: 979 - protein, 56 aa, Homo Sapiens
LCKLVGRSIRRSTQMLQSTSQSFLRSAQRGGRPCLLKRKENLKIWQKRTRPVMKEK

SEQ ID NO: 980 - protein, 49 aa, Homo Sapiens
SSSSALSIAQKSKENILACPLVMLRRNWERCGITLLQMTSSLMKRRLRS

SEQ ID NO: 981 - protein, 40 aa, Homo Sapiens
QKSKENILACPLVMLRRNWERCGITLLQMTSSLMKRRLRS

SEQ ID NO: 982 - protein, 31 aa, Homo Sapiens
CPLVMLRRNWERCGITLLQMTSSLMKRRLRS

SEQ ID NO: 983 - protein, 8 aa, Homo Sapiens
LMKRRLRS

SEQ ID NO: 984 - protein, 45 aa, Homo Sapiens
ALNIAQRSKVNTLAYPLGILQRNWVKCGLSSQPKINNHMNRKQLS

SEQ ID NO: 985 - protein, 4 aa, Homo Sapiens
DHSQ

SEQ ID NO: 986 - protein, 13 aa, Homo Sapiens
YWLLISLGLMPKM

SEQ ID NO: 987 - protein, 7 aa, Homo Sapiens
LVQMPEP

SEQ ID NO: 988 - protein, 9 aa, Homo Sapiens
WLKGVLLKL

SEQ ID NO: 989 - protein, 10 aa, Homo Sapiens
LPSSPTPTVW

SEQ ID NO: 990 - protein, 15 aa, Homo Sapiens
LVVSWKDQSPVSSNH

SEQ ID NO: 991 - protein, 1 aa, Homo Sapiens
M

SEQ ID NO: 992 - protein, 1 aa, Homo Sapiens
D

SEQ ID NO: 993 - skipped

SEQ ID NO: 994 - protein, 2 aa, Homo Sapiens
AL

SEQ ID NO: 995 - skipped

SEQ ID NO: 996 - protein, 42 aa, Homo Sapiens
LQMPSSVESWPLRMPTPSCPSWRPPCSGPSRTWRGSCVSTRS

SEQ ID NO: 997 - protein, 17 aa, Homo Sapiens
CSGPSRTWRGSCVSTRS

SEQ ID NO: 998 - protein, 13 aa, Homo Sapiens
SRTWRGSCVSTRS

SEQ ID NO: 999 - protein, 25 aa, Homo Sapiens
WTSRSPPTGSCWRARRAGWSLGCRT

SEQ ID NO: 1000 - protein, 36 aa, Homo Sapiens
MGASQAPASATAWAPALALARAPAPSAAPAPPGPWL

SEQ ID NO: 1001 - protein, 28 aa, Homo Sapiens
SATAWAPALALARAPAPSAAPAPPGPWL

SEQ ID NO: 1002 - protein, 3 aa, Homo Sapiens
PWL

SEQ ID NO: 1003 - protein, 4 aa, Homo Sapiens
LPPS

SEQ ID NO: 1004 - protein, 27 aa, Homo Sapiens
VEATWTTCSRATSTTLGGSWRLWARRS

SEQ ID NO: 1005 - protein, 39 aa, Homo Sapiens
ATCRGWWRTSRTSMRMRSISVQRWRTNLSSSRRMWMKLT

SEQ ID NO: 1006 - protein, 34 aa, Homo Sapiens
WWRTSRTSMRMRSISVQRWRTNLSSSRRMWMKLT

SEQ ID NO: 1007 - protein, 12 aa, Homo Sapiens
LSSSRRMWMKLT

SEQ ID NO: 1008 - protein, 35 aa, Homo Sapiens
GLRLRACTRSSMRSCRAWLGSTGMTCGAQRLRSLR

SEQ ID NO: 1009 - protein, 3 aa, Homo Sapiens
TAS

SEQ ID NO: 1010 - protein, 7 aa, Homo Sapiens
CAGCWMS

SEQ ID NO: 1011 - protein, 4 aa, Homo Sapiens
MSCK

SEQ ID NO: 1012 - protein, 8 aa, Homo Sapiens
GKVMASIS

SEQ ID NO: 1013 - protein, 23 aa, Homo Sapiens
MLPLKTLLMSVLYPPGILARGLC

SEQ ID NO: 1014 - protein, 21 aa, Homo Sapiens
PLKTLLMSVLYPPGILARGLC

SEQ ID NO: 1015 - protein, 83 aa, Homo Sapiens
LLLPLEPLQLLAASLLEPSLTRSRQPSGSHGFLWLLTPGLTTSLSRRHLMLTYLPLRCVTQILLCAMWTLPSHATTRELTQWV

SEQ ID NO: 1016 - protein, 71 aa, Homo Sapiens
ASLLEPSLTRSRQPSGSHGFLWLLTPGLTTSLSRRHLMLTYLPLRCVTQILLCAMWTLPSHATTRELTQWV

SEQ ID NO: 1017 - protein, 57 aa, Homo Sapiens
SGSHGFLWLLTPGLTTSLSRRHLMLTYLPLRCVTQILLCAMWTLPSHATTRELTQWV

SEQ ID NO: 1018 - protein, 52 aa, Homo Sapiens
FLWLLTPGLTTSLSRRHLMLTYLPLRCVTQILLCAMWTLPSHATTRELTQWV

SEQ ID NO: 1019 - protein, 44 aa, Homo Sapiens
LTTSLSRRHLMLTYLPLRCVTQILLCAMWTLPSHATTRELTQWV

SEQ ID NO: 1020 - protein, 12 aa, Homo Sapiens
SHATTRELTQWV

SEQ ID NO: 1021 - protein, 9 aa, Homo Sapiens
KTRELTQWV

SEQ ID NO: 1022 - skipped

SEQ ID NO: 1023 - protein, 43 aa, Homo Sapiens
VGKFCACVAPFPVNTHGRSCLICTSTEILKRLKKKSRLLLRRQ

SEQ ID NO: 1024 - protein, 39 aa, Homo Sapiens
CACVAPFPVNTHGRSCLICTSTEILKRLKKKSRLLLRRQ

SEQ ID NO: 1025 - protein, 34 aa, Homo Sapiens
PFPVNTHGRSCLICTSTEILKRLKKKSRLLLRRQ

SEQ ID NO: 1026 - protein, 28 aa, Homo Sapiens
HGRSCLICTSTEILKRLKKKSRLLLRRQ

SEQ ID NO: 1027 - protein, 23 aa, Homo Sapiens
LICTSTEILKRLKKKSRLLLRRQ

SEQ ID NO: 1028 - protein, 15 aa, Homo Sapiens
LKRLKKKSRLLLRRQ

SEQ ID NO: 1029 - protein, 9 aa, Homo Sapiens
KSRLLLRRQ

SEQ ID NO: 1030 - protein, 5 aa, Homo Sapiens
VLRRQ

SEQ ID NO: 1031 - protein, 60 aa, Homo Sapiens
RVNGLLPLLSSLLLSLRLQTGLKVYRCPLCLFSNSLLKTGALSLPRKTGLQLPLLRPLNG

SEQ ID NO: 1032 - protein, 55 aa, Homo Sapiens
VPLLSSLLLSLRLQTGLKVYRCPLCLFSNSLLKTGALSLPRKTGLQLPLLRPLNG

SEQ ID NO: 1033 - protein, 48 aa, Homo Sapiens
VLSLRLQTGLKVYRCPLCLFSNSLLKTGALSLPRKTGLQLPLLRPLNG

SEQ ID NO: 1034 - protein, 16 aa, Homo Sapiens
LPKLILMAMDTSASMS

SEQ ID NO: 1035 - protein, 17 aa, Homo Sapiens
MHQLRKKRQQFQTIRSL

SEQ ID NO: 1036 - protein, 33 aa, Homo Sapiens
DKLVWRVLSAFWESLWLMNLLLWMFWKISLKEK

SEQ ID NO: 1037 - protein, 8 aa, Homo Sapiens
WKISLKEK

SEQ ID NO: 1038 - protein, 8 aa, Homo Sapiens
MWQIKIIL

SEQ ID NO: 1039 - protein, 4 aa, Homo Sapiens
ILRL

SEQ ID NO: 1040 - protein, 1 aa, Homo Sapiens
M

SEQ ID NO: 1041 - protein, 2 aa, Homo Sapiens
AS

SEQ ID NO: 1042 - protein, 16 aa, Homo Sapiens
MWFPTQWTFLRMLPGN

SEQ ID NO: 1043 - skipped

SEQ ID NO: 1044 - protein, 45 aa, Homo Sapiens
MEVDVIWILLDFATLWLKNLAFIPAAAMDGFWGNMATQVWLCGVV

SEQ ID NO: 1045 - protein, 40 aa, Homo Sapiens
IWILLDFATLWLKNLAFIPAAAMDGFWGNMATQVWLCGVV

SEQ ID NO: 1046 - protein, 36 aa, Homo Sapiens
VDFATLWLKNLAFIPAAAMDGFWGNMATQVWLCGVV

SEQ ID NO: 1047 - protein, 30 aa, Homo Sapiens
WLKNLAFIPAAAMDGFWGNMATQVWLCGVV

SEQ ID NO: 1048 - protein, 29 aa, Homo Sapiens
VKNLAFIPAAAMDGFWGNMATQVWLCGVV

SEQ ID NO: 1049 - protein, 24 aa, Homo Sapiens
FIPAAAMDGFWGNMATQVWLCGVV

SEQ ID NO: 1050 - protein, 18 aa, Homo Sapiens
MDGFWGNMATQVWLCGVV

SEQ ID NO: 1051 - protein, 14 aa, Homo Sapiens
WGNMATQVWLCGVV

SEQ ID NO: 1052 - protein, 9 aa, Homo Sapiens
TQVWLCGVV

SEQ ID NO: 1053 - protein, 22 aa, Homo Sapiens
MIVKIGRKCIRWWLKVPMKSSS

SEQ ID NO: 1054 - protein, 17 aa, Homo Sapiens
GRKCIRWWLKVPMKSSS

SEQ ID NO: 1055 - protein, 42 aa, Homo Sapiens
TPTPSCATARTAGPGGPSSGRLSFPSSLEVLQRCASPSTRPT

SEQ ID NO: 1056 - skipped

SEQ ID NO: 1057 - protein, 36 aa, Homo Sapiens
VQTHTSTSSGCAGKLATTLLGQAWCKSTKVMGRRQW

SEQ ID NO: 1058 - protein, 49 aa, Homo Sapiens
MWAGTTPPSPKSRRDPRCLRWLHPGTRRTLCSRPAHPNLLVGRNKRFRD

SEQ ID NO: 1059 - protein, 48 aa, Homo Sapiens
LYLLELELLEQHCISCVWHCSIQMFVGTEITQSPGTNWVPMINTSSTQ

SEQ ID NO: 1060 - protein, 29 aa, Homo Sapiens
CSIQMFVGTEITQSPGTNWVPMINTSSTQ

SEQ ID NO: 1061 - protein, 60 aa, Homo Sapiens
WLIFWSLRERSNWKKQLKYGSSGHMLCGSSMKQKRQGQRISYPSSMLATIHEVIQWKDAR

SEQ ID NO: 1062 - protein, 39 aa, Homo Sapiens
LGASSLVAFRRLLLLFDTVETMGKDYLSSDLLDSMTGVF

SEQ ID NO: 1063 - protein, 13 aa, Homo Sapiens
LSSDLLDSMTGVF

SEQ ID NO: 1064 - skipped

SEQ ID NO: 1065 - protein, 2 aa, Homo Sapiens
MH

SEQ ID NO: 1066 - protein, 5 aa, Homo Sapiens
MVKLN

SEQ ID NO: 1067 - protein, 12 aa, Homo Sapiens
SFRLKLKRLNYG

SEQ ID NO: 1068 - protein, 44 aa, Homo Sapiens
ALASDLGASSLVAFRRLLLLFDTVETMGKDYLSSDLLDSMTGVF

SEQ ID NO: 1069 - protein, 5 aa, Homo Sapiens
FRPGR

SEQ ID NO: 1070 - protein, 2 aa, Homo Sapiens
VN

SEQ ID NO: 1071 - protein, 6 aa, Homo Sapiens
MLKQRQ

SEQ ID NO: 1072 - protein, 8 aa, Homo Sapiens
RFPLGALK

SEQ ID NO: 1073 - protein, 2 aa, Homo Sapiens
LK

SEQ ID NO: 1074 - protein, 1 aa, Homo Sapiens
S

SEQ ID NO: 1075 - protein, 11 aa, Homo Sapiens
LEVVARFHRKK

SEQ ID NO: 1076 - protein, 47 aa, Homo Sapiens
DDLSLVKNEKLNLELGQKNSPMFTSRILEKTWMMSALRISLASLGLP

SEQ ID NO: 1077 - protein, 20 aa, Homo Sapiens
LEKTWMMSALRISLASLGLP

SEQ ID NO: 1078 - protein, 3 aa, Homo Sapiens
LDL

SEQ ID NO: 1079 - protein, 19 aa, Homo Sapiens
VELRKRWNGRRNLSANLNR

SEQ ID NO: 1080 - protein, 5 aa, Homo Sapiens
VLIFM

SEQ ID NO: 1081 - protein, 18 aa, Homo Sapiens
LVLYVSPPQKKPLKQLQK

SEQ ID NO: 1082 - protein, 36 aa, Homo Sapiens
LVTSFHVRWFVMKMVPRAMDLYTLRRRKQLKELLKK

SEQ ID NO: 1083 - protein, 26 aa, Homo Sapiens
VMKMVPRAMDLYTLRRRKQLKELLKK

SEQ ID NO: 1084 - protein, 5 aa, Homo Sapiens
SPTCV

SEQ ID NO: 1085 - protein, 28 aa, Homo Sapiens
RRYEMLAMSLTSASPQCRRERSGPSGQC

SEQ ID NO: 1086 - protein, 32 aa, Homo Sapiens
LRWSPTILSTATSVRIAGMQTSQKISYPPVRV

SEQ ID NO: 1087 - protein, 26 aa, Homo Sapiens
ILSTATSVRIAGMQTSQKISYPPVRV

SEQ ID NO: 1088 - protein, 6 aa, Homo Sapiens
YPPVRV

SEQ ID NO: 1089 - protein, 22 aa, Homo Sapiens
MATASGALSSIWRVSLKRLSWS

SEQ ID NO: 1090 - protein, 18 aa, Homo Sapiens
SGALSSIWRVSLKRLSWS

SEQ ID NO: 1091 - protein, 13 aa, Homo Sapiens
RLVFPLSMNWTRT

SEQ ID NO: 1092 - protein, 8 aa, Homo Sapiens
LSMNWTRT

SEQ ID NO: 1093 - protein, 8 aa, Homo Sapiens
MSMNWTRT

SEQ ID NO: 1094 - protein, 43 aa, Homo Sapiens
ARPRSEGRRGGYCPQEHPPCPSCPSAPPTCTCHTDHICRHLEL

SEQ ID NO: 1095 - protein, 31 aa, Homo Sapiens
LWSVLLIGLSPKLMISWPMRQREPKWWVPSP

SEQ ID NO: 1096 - protein, 31 aa, Homo Sapiens
TSRPSSKALLQKWELENPAVTGWEMREQATS

SEQ ID NO: 1097 - protein, 2 aa, Homo Sapiens
MW

SEQ ID NO: 1098 - protein, 12 aa, Homo Sapiens
SSLLRATPRQLS

SEQ ID NO: 1099 - protein, 39 aa, Homo Sapiens
STTCNYLRNSAAWRPLPATPQKPPPWVPWRPPSSAAVGP

SEQ ID NO: 1100 - protein, 19 aa, Homo Sapiens
QKPPPWVPWRPPSSAAVGP

SEQ ID NO: 1101 - protein, 10 aa, Homo Sapiens
DTAHVPPSLL

SEQ ID NO: 1102 - protein, 7 aa, Homo Sapiens
HVPPSLL

SEQ ID NO: 1103 - protein, 66 aa, Homo Sapiens
LGSSRMLIWCLRHSSARHLMSMKLGRSWERRERTSRLSAKSRIMRGFGGLMKSWRPVMGSWWLVVI

SEQ ID NO: 1104 - protein, 6 aa, Homo Sapiens
LARMYS

SEQ ID NO: 1105 - skipped

SEQ ID NO: 1106 - protein, 58 aa, Homo Sapiens
QMCLTRACCVTCCGLTLTRTCRAGARTTVASLLPLEPRWWPSSSTSTTWTSSAEHTRW

SEQ ID NO: 1107 - protein, 72 aa, Homo Sapiens
ISPCWELRSVYGAQATGARTQRQQPSAMLSSIANAMCGTRRRNIPSWQKPQHWFFSTCVSGGMNAQICLTLL

SEQ ID NO: 1108 - protein, 4 aa, Homo Sapiens
RSLD

SEQ ID NO: 1109 - protein, 8 aa, Homo Sapiens
ARQCGARM

SEQ ID NO: 1110 - protein, 31 aa, Homo Sapiens
TSLSSSTLRTAPAASPSQRIMGTFARTAFRW

SEQ ID NO: 1111 - protein, 19 aa, Homo Sapiens
AASPSQRIMGTFARTAFRW

SEQ ID NO: 1112 - protein, 14 aa, Homo Sapiens
QRIMGTFARTAFRW

SEQ ID NO: 1113 - protein, 21 aa, Homo Sapiens
AGFIKLNMQWKLLNKVQPQLV

SEQ ID NO: 1114 - protein, 3 aa, Homo Sapiens
WLH

SEQ ID NO: 1115 - protein, 41 aa, Homo Sapiens
MVSQLRGLLLMLDCYVILCVRSVWIPDLYSIDHCLCLVLYL

SEQ ID NO: 1116 - protein, 18 aa, Homo Sapiens
WIPDLYSIDHCLCLVLYL

SEQ ID NO: 1117 - protein, 14 aa, Homo Sapiens
LYSIDHCLCLVLYL

SEQ ID NO: 1118 - protein, 53 aa, Homo Sapiens
VSLLLVMMIWALTFSKPVHLLTILTAEPCPLEPVPNQLVLTWRDICLNLWSVI

SEQ ID NO: 1119 - protein, 16 aa, Homo Sapiens
LTATLPFFHPRVGSTK

SEQ ID NO: 1120 - protein, 5 aa, Homo Sapiens
VALHQ

SEQ ID NO: 1121 - protein, 5 aa, Homo Sapiens
WIPAQ

SEQ ID NO: 1122 - protein, 14 aa, Homo Sapiens
MLEKILQLLLLILD

SEQ ID NO: 1123 - protein, 9 aa, Homo Sapiens
LQLLLLILD

SEQ ID NO: 1124 - protein, 5 aa, Homo Sapiens
LLILD

SEQ ID NO: 1125 - protein, 12 aa, Homo Sapiens
MDAAVFMETVLR

SEQ ID NO: 1126 - protein, 14 aa, Homo Sapiens
VREMCTLGTHSGSA

SEQ ID NO: 1127 - protein, 8 aa, Homo Sapiens
PCTAGARR

SEQ ID NO: 1128 - protein, 2 aa, Homo Sapiens
AT

SEQ ID NO: 1129 - protein, 5 aa, Homo Sapiens
VSVMV

SEQ ID NO: 1130 - protein, 11 aa, Homo Sapiens
LQRVLTLPPRR

SEQ ID NO: 1131 - protein, 35 aa, Homo Sapiens
RRPMQILGGWTTKFRKLRNLWSFLSPILNIMKRWV

SEQ ID NO: 1132 - protein, 29 aa, Homo Sapiens
MGGWTTKFRKLRNLWSFLSPILNIMKRWV

SEQ ID NO: 1133 - protein, 3 aa, Homo Sapiens
MPC

SEQ ID NO: 1134 - protein, 21 aa, Homo Sapiens
WLQISRHSRVNSLYRLPGVQR

SEQ ID NO: 1135 - protein, 1 aa, Homo Sapiens
L

SEQ ID NO: 1136 - protein, 6 aa, Homo Sapiens
QSMTRG

SEQ ID NO: 1137 - protein, 18 aa, Homo Sapiens
RGRPSWPGPVPHRLRPPS

SEQ ID NO: 1138 - protein, 10 aa, Homo Sapiens
LLLTSSPFWP

SEQ ID NO: 1139 - protein, 24 aa, Homo Sapiens
VIQRPAATLRTTWALSHWLMTVKC

SEQ ID NO: 1140 - protein, 2 aa, Homo Sapiens
KE

SEQ ID NO: 1141 - protein, 8 aa, Homo Sapiens
ALHGPSPK

SEQ ID NO: 1142 - protein, 28 aa, Homo Sapiens
WRQDWCLCTLIPRGTRKHCIWVLSCCGS

SEQ ID NO: 1143 - protein, 6 aa, Homo Sapiens
WWKYSF

SEQ ID NO: 1144 - protein, 21 aa, Homo Sapiens
LPKEMVSLSFMKTLSVNLNTG

SEQ ID NO: 1145 - protein, 30 aa, Homo Sapiens
TTKMLCGFWAVLTSRIYQCLSSRREPSRWG

SEQ ID NO: 1146 - protein, 22 aa, Homo Sapiens
WAVLTSRIYQCLSSRREPSRWG

SEQ ID NO: 1147 - protein, 56 aa, Homo Sapiens
LGTISVIVLWVFLRCSKPRNRKLIQEKLLKTLPNTSQTMNVLKKLKLLVLVLLMST

SEQ ID NO: 1148 - protein, 5 aa, Homo Sapiens
LYQNN

SEQ ID NO: 1149 - protein, 19 aa, Homo Sapiens
LLEAFSPLQRSELDATVGL

SEQ ID NO: 1150 - protein, 34 aa, Homo Sapiens
LRLSSLIHSIKLSEEILTPSGSPNQSTSTGRCVG

SEQ ID NO: 1151 - protein, 46 aa, Homo Sapiens
ERAVALERATSSTTLLVALAGQLGEGAILSSSTVTANISKVCKIHT

SEQ ID NO: 1152 - protein, 40 aa, Homo Sapiens
ERATSSTTLLVALAGQLGEGAILSSSTVTANISKVCKIHT

SEQ ID NO: 1153 - protein, 31 aa, Homo Sapiens
MVALAGQLGEGAILSSSTVTANISKVCKIHT

SEQ ID NO: 1154 - protein, 19 aa, Homo Sapiens
ILSSSTVTANISKVCKIHT

SEQ ID NO: 1155 - protein, 10 aa, Homo Sapiens
NISKVCKIHT

SEQ ID NO: 1156 - protein, 42 aa, Homo Sapiens
LAFPWHPKKHSVPLLLVSARRRLCWQQSRLCRQHPTCPSRLT

SEQ ID NO: 1157 - protein, 39 aa, Homo Sapiens
GAGVAAVDGAGAEAAELAEARPRIRSGCPSPSWAAWSRT

SEQ ID NO: 1158 - protein, 33 aa, Homo Sapiens
VDGAGAEAAELAEARPRIRSGCPSPSWAAWSRT

SEQ ID NO: 1159 - protein, 24 aa, Homo Sapiens
ELAEARPRIRSGCPSPSWAAWSRT

SEQ ID NO: 1160 - protein, 19 aa, Homo Sapiens
RPRIRSGCPSPSWAAWSRT

SEQ ID NO: 1161 - protein, 15 aa, Homo Sapiens
RSGCPSPSWAAWSRT

SEQ ID NO: 1162 - protein, 7 aa, Homo Sapiens
WAAWSRT

SEQ ID NO: 1163 - protein, 6 aa, Homo Sapiens
AAWSRT

SEQ ID NO: 1164 - protein, 29 aa, Homo Sapiens
WRRSISSPCLLRNQRSLISSWGPLSRMRF

SEQ ID NO: 1165 - protein, 13 aa, Homo Sapiens
MISSWGPLSRMRF

SEQ ID NO: 1166 - protein, 7 aa, Homo Sapiens
PLSRMRF

SEQ ID NO: 1167 - skipped

SEQ ID NO: 1168 - protein, 64 aa, Homo Sapiens
SAPGSRHLLLSGTTMATSVWVLSAPRRWPPPSVGPSSWPSSPSSPCAEATGGTRSASPTLSLAR

SEQ ID NO: 1169 - protein, 61 aa, Homo Sapiens
GSRHLLLSGTTMATSVWVLSAPRRWPPPSVGPSSWPSSPSSPCAEATGGTRSASPTLSLAR

SEQ ID NO: 1170 - protein, 57 aa, Homo Sapiens
LLLSGTTMATSVWVLSAPRRWPPPSVGPSSWPSSPSSPCAEATGGTRSASPTLSLAR

SEQ ID NO: 1171 - protein, 55 aa, Homo Sapiens
LSGTTMATSVWVLSAPRRWPPPSVGPSSWPSSPSSPCAEATGGTRSASPTLSLAR

SEQ ID NO: 1172 - protein, 42 aa, Homo Sapiens
SAPRRWPPPSVGPSSWPSSPSSPCAEATGGTRSASPTLSLAR

SEQ ID NO: 1173 - protein, 35 aa, Homo Sapiens
PPSVGPSSWPSSPSSPCAEATGGTRSASPTLSLAR

SEQ ID NO: 1174 - protein, 34 aa, Homo Sapiens
PSVGPSSWPSSPSSPCAEATGGTRSASPTLSLAR

SEQ ID NO: 1175 - protein, 33 aa, Homo Sapiens
SVGPSSWPSSPSSPCAEATGGTRSASPTLSLAR

SEQ ID NO: 1176 - protein, 25 aa, Homo Sapiens
SSPSSPCAEATGGTRSASPTLSLAR

SEQ ID NO: 1177 - protein, 19 aa, Homo Sapiens
CAEATGGTRSASPTLSLAR

SEQ ID NO: 1178 - protein, 12 aa, Homo Sapiens
TRSASPTLSLAR

SEQ ID NO: 1179 - protein, 8 aa, Homo Sapiens
SPTLSLAR

SEQ ID NO: 1180 - protein, 6 aa, Homo Sapiens
TLSLAR

SEQ ID NO: 1181 - protein, 6 aa, Homo Sapiens
QLSLAR

SEQ ID NO: 1182 - protein, 3 aa, Homo Sapiens
LAR

SEQ ID NO: 1183 - protein, 1 aa, Homo Sapiens
R

SEQ ID NO: 1184 - protein, 27 aa, Homo Sapiens
AALCWYASSLHPGALASSPHLCLRSCS

SEQ ID NO: 1185 - protein, 25 aa, Homo Sapiens
LCWYASSLHPGALASSPHLCLRSCS

SEQ ID NO: 1186 - protein, 18 aa, Homo Sapiens
LHPGALASSPHLCLRSCS

SEQ ID NO: 1187 - protein, 17 aa, Homo Sapiens
DPGALASSPHLCLRSCS

SEQ ID NO: 1188 - protein, 15 aa, Homo Sapiens
GALASSPHLCLRSCS

SEQ ID NO: 1189 - protein, 14 aa, Homo Sapiens
ALASSPHLCLRSCS

SEQ ID NO: 1190 - protein, 8 aa, Homo Sapiens
HLCLRSCS

SEQ ID NO: 1191 - protein, 8 aa, Homo Sapiens
DLCLRSCS

SEQ ID NO: 1192 - protein, 7 aa, Homo Sapiens
LCLRSCS

SEQ ID NO: 1193 - protein, 5 aa, Homo Sapiens
LRSCS

SEQ ID NO: 1194 - protein, 1 aa, Homo Sapiens
S

SEQ ID NO: 1195 - protein, 34 aa, Homo Sapiens
VVSMTATPQPGAALPPWATSPRPPLMPFLRPTAT

SEQ ID NO: 1196 - protein, 33 aa, Homo Sapiens
VSMTATPQPGAALPPWATSPRPPLMPFLRPTAT

SEQ ID NO: 1197 - protein, 28 aa, Homo Sapiens
TPQPGAALPPWATSPRPPLMPFLRPTAT

SEQ ID NO: 1198 - protein, 26 aa, Homo Sapiens
QPGAALPPWATSPRPPLMPFLRPTAT

SEQ ID NO: 1199 - protein, 24 aa, Homo Sapiens
GAALPPWATSPRPPLMPFLRPTAT

SEQ ID NO: 1200 - protein, 19 aa, Homo Sapiens
PWATSPRPPLMPFLRPTAT

SEQ ID NO: 1201 - protein, 18 aa, Homo Sapiens
WATSPRPPLMPFLRPTAT

SEQ ID NO: 1202 - protein, 16 aa, Homo Sapiens
TSPRPPLMPFLRPTAT

SEQ ID NO: 1203 - protein, 15 aa, Homo Sapiens
SPRPPLMPFLRPTAT

SEQ ID NO: 1204 - protein, 11 aa, Homo Sapiens
PLMPFLRPTAT

SEQ ID NO: 1205 - protein, 10 aa, Homo Sapiens
LMPFLRPTAT

SEQ ID NO: 1206 - protein, 7 aa, Homo Sapiens
FLRPTAT

SEQ ID NO: 1207 - protein, 6 aa, Homo Sapiens
LRPTAT

SEQ ID NO: 1208 - protein, 1 aa, Homo Sapiens
T

SEQ ID NO: 1209 - protein, 46 aa, Homo Sapiens
SGRRLYSPSLPIRSSLTTSSRPTPESPCSGLRLQLWLQHRVFIQEK

SEQ ID NO: 1210 - protein, 1 aa, Homo Sapiens
L

SEQ ID NO: 1211 - protein, 16 aa, Homo Sapiens
FLRRLRRNLKRKGNSL

SEQ ID NO: 1212 - protein, 12 aa, Homo Sapiens
MRRNLKRKGNSL

SEQ ID NO: 1213 - protein, 1 aa, Homo Sapiens
L

SEQ ID NO: 1214 - protein, 4 aa, Homo Sapiens
LPSR

SEQ ID NO: 1215 - protein, 11 aa, Homo Sapiens
LGVKRPPGWWM

SEQ ID NO: 1216 - protein, 5 aa, Homo Sapiens
SFKAN

SEQ ID NO: 1217-1218 - skipped (2 entries)

SEQ ID NO: 1219 - protein, 10 aa, Homo Sapiens
CSWVCFRLLI

SEQ ID NO: 1220 - protein, 28 aa, Homo Sapiens
ALDKLLLTMFMGMPCRKLPRQGFWHFQL

SEQ ID NO: 1221 - protein, 23 aa, Homo Sapiens
LLTMFMGMPCRKLPRQGFWHFQL

SEQ ID NO: 1222 - protein, 9 aa, Homo Sapiens
RQGFWHFQL

SEQ ID NO: 1223 - protein, 5 aa, Homo Sapiens
WHFQL

SEQ ID NO: 1224 - protein, 4 aa, Homo Sapiens
HFQL

SEQ ID NO: 1225 - protein, 27 aa, Homo Sapiens
AISTITMWASAKLLPCCGSSDLFDFIL

SEQ ID NO: 1226 - protein, 65 aa, Homo Sapiens
CFELQWSDLLISQHFFRTDLSQNGVECSTYTCHRATILAPRLHLSTGLARGLSVFCSWVCFRLLI

SEQ ID NO: 1227 - protein, 6 aa, Homo Sapiens
WTVRFM

SEQ ID NO: 1228 - protein, 40 aa, Homo Sapiens
WNGLLATMDHSEVCGLLETHPALLLLNLKIPEMQLMQSES

SEQ ID NO: 1229 - protein, 36 aa, Homo Sapiens
LATMDHSEVCGLLETHPALLLLNLKIPEMQLMQSES

SEQ ID NO: 1230 - protein, 24 aa, Homo Sapiens
LETHPALLLLNLKIPEMQLMQSES

SEQ ID NO: 1231 - protein, 16 aa, Homo Sapiens
LLNLKIPEMQLMQSES

SEQ ID NO: 1232 - protein, 100 aa, Homo Sapiens
HLPLGVVALEMIIVGGVLHLVADLQEGEASLAAGAGPFLEIGEERDRCLGREITSRPDPSLGLVVDLGQMKGNRRQFAREVVYRKLLHLTGVCTENSSFV

SEQ ID NO: 1233 - protein, 67 aa, Homo Sapiens
GAGPFLEIGEERDRCLGREITSRPDPSLGLVVDLGQMKGNRRQFAREVVYRKLLHLTGVCTENSSFV

SEQ ID NO: 1234 - protein, 53 aa, Homo Sapiens
CLGREITSRPDPSLGLVVDLGQMKGNRRQFAREVVYRKLLHLTGVCTENSSFV

SEQ ID NO: 1235 - protein, 43 aa, Homo Sapiens
DPSLGLVVDLGQMKGNRRQFAREVVYRKLLHLTGVCTENSSFV

SEQ ID NO: 1236 - protein, 39 aa, Homo Sapiens
VWTCLPIRTRRPTRRPSSWRSTATPKSVPSVPTRASTGR

SEQ ID NO: 1237 - protein, 10 aa, Homo Sapiens
LWAEEHPLQA

SEQ ID NO: 1238 - protein, 114 aa, Homo Sapiens
QWGSPLEEGLQWACPLRECGLLPLGCEAFFDPWPQSMEVAPQRRGLDSSGPRYHRPVCFLCCCSWSLMGLSGFPYRAPSPGNAPTKALDSSWPSSAPCLFPVRLYIVLLSPCGL

SEQ ID NO: 1239 - protein, 109 aa, Homo Sapiens
LEEGLQWACPLRECGLLPLGCEAFFDPWPQSMEVAPQRRGLDSSGPRYHRPVCFLCCCSWSLMGLSGFPYRAPSPGNAPTKALDSSWPSSAPCLFPVRLYIVLLSPCGL

SEQ ID NO: 1240 - protein, 1 aa, Homo Sapiens
F

SEQ ID NO: 1241 - protein, 8 aa, Homo Sapiens
RSFTSLTL

SEQ ID NO: 1242 - protein, 11 aa, Homo Sapiens
VWCIKQTKLKM

SEQ ID NO: 1243 - protein, 10 aa, Homo Sapiens
WCIKQTKLKM

SEQ ID NO: 1244 - protein, 7 aa, Homo Sapiens
MRNSTVN

SEQ ID NO: 1245 - protein, 11 aa, Homo Sapiens
LATSICHGTSF

SEQ ID NO: 1246 - protein, 1 aa, Homo Sapiens
L

SEQ ID NO: 1247 - protein, 6 aa, Homo Sapiens
WFLKDP

SEQ ID NO: 1248 - protein, 2 aa, Homo Sapiens
IM

SEQ ID NO: 1249 - protein, 6 aa, Homo Sapiens
WLPNHC

SEQ ID NO: 1250 - protein, 5 aa, Homo Sapiens
QPLGS

SEQ ID NO: 1251 - protein, 3 aa, Homo Sapiens
CRN

SEQ ID NO: 1252 - protein, 27 aa, Homo Sapiens
AGSAVSPTWSPKSWRREPASCTSATFF

SEQ ID NO: 1253 - protein, 17 aa, Homo Sapiens
VLLSTPASFPLLSWARQ

SEQ ID NO: 1254 - protein, 56 aa, Homo Sapiens
CLPWGMFSLDPFGFSRQTCMWDWWSCVASSFLILNSLLKRPNMEIKIISGTALISS

SEQ ID NO: 1255 - protein, 10 aa, Homo Sapiens
CAPGSPCGPR

SEQ ID NO: 1256 - protein, 2 aa, Homo Sapiens
MS

SEQ ID NO: 1257 - protein, 3 aa, Homo Sapiens
NLL

SEQ ID NO: 1258 - protein, 4 aa, Homo Sapiens
MVKT

SEQ ID NO: 1259 - protein, 7 aa, Homo Sapiens
WTTVRMV

SEQ ID NO: 1260 - protein, 11 aa, Homo Sapiens
GKNLVPTSSLV

SEQ ID NO: 1261 - protein, 22 aa, Homo Sapiens
CPRPESTYYWPDRLGWSMWWCM

SEQ ID NO: 1262 - protein, 50 aa, Homo Sapiens
MFLTTLHMIREPSESKSTFQQSTHSNHRRSHLKQRSITQTSTKRGRSVCQ

SEQ ID NO: 1263 - protein, 14 aa, Homo Sapiens
MGHQGQIMKTEYIA

SEQ ID NO: 1264 - protein, 1 aa, Homo Sapiens
L

SEQ ID NO: 1265 - protein, 2 aa, Homo Sapiens
KE

SEQ ID NO: 1266 - protein, 26 aa, Homo Sapiens
HQKDKHTTINFSGSQTCLKSTTFYSC

SEQ ID NO: 1267 - protein, 10 aa, Homo Sapiens
WKNLKKDKKE

SEQ ID NO: 1268 - protein, 141 aa, Homo Sapiens
CCGRQPCGVRQPSLRRSSSCRRRRLACWTTACVWPPSSPLSPLARWECGLMLAAVLRLRRIMGQATFWSIWLSREQRIGLAVPWRRRWRAWGPILMPTAPGSTQLTTSRRCPRICRKLWSSWVTLCRTVVWKTHRLRRNVM

SEQ ID NO: 1269 - protein, 86 aa, Homo Sapiens
LRLRRIMGQATFWSIWLSREQRIGLAVPWRRRWRAWGPILMPTAPGSTQLTTSRRCPRICRKLWSSWVTLCRTVVWKTHRLRRNVM

SEQ ID NO: 1270 - protein, 74 aa, Homo Sapiens
WSIWLSREQRIGLAVPWRRRWRAWGPILMPTAPGSTQLTTSRRCPRICRKLWSSWVTLCRTVVWKTHRLRRNVM

SEQ ID NO: 1271 - protein, 10 aa, Homo Sapiens
MSSPRAMDLA

SEQ ID NO: 1272 - protein, 8 aa, Homo Sapiens
LAAPFTRK

SEQ ID NO: 1273 - protein, 11 aa, Homo Sapiens
LVMRAGLLATR

SEQ ID NO: 1274 - protein, 69 aa, Homo Sapiens
TGTMTPCARQSRSPLSTGDRCSPSPVKWMPLKEPMSPWNARCVKWKRTLPLKLLTTKTLLAACRMRFRI

SEQ ID NO: 1275 - protein, 68 aa, Homo Sapiens [sequence omitted]

SEQ ID NO: 1276 - protein, 58 aa, Homo Sapiens
ETWPRTSCASGRNCRRRCFRERKPKTPCNLSDRMLTMRLWHVLTLNAKWNLCKKRLPF

SEQ ID NO: 1277 - protein, 7 aa, Homo Sapiens
CKKRLPF

SEQ ID NO: 1278 - protein, 3 aa, Homo Sapiens
MPF

SEQ ID NO: 1279 - protein, 90 aa, Homo Sapiens [sequence omitted]

SEQ ID NO: 1280 - protein, 81 aa, Homo Sapiens
VIAVVSLVILPRIVIFRRMPAITAVEVATLPRTARSPRESESNAATTVANQAIWLVTATMQMSRNAILVENSDTFKKTAPK

SEQ ID NO: 1281 - protein, 19 aa, Homo Sapiens
LEPVGPACLAVQLQTITIP

SEQ ID NO: 1282 - protein, 17 aa, Homo Sapiens
GPLFIDQSWSDQPWKTH

SEQ ID NO: 1283 - protein, 5 aa, Homo Sapiens
WTRRV

SEQ ID NO: 1284 - protein, 9 aa, Homo Sapiens
GKIRKGRRR

SEQ ID NO: 1285 - protein, 35 aa, Homo Sapiens
LVVEVNMLISMRRMKVASSWWIQRAHRRRPTSGIE

SEQ ID NO: 1286 - protein, 5 aa, Homo Sapiens
TSGIE

SEQ ID NO: 1287 - protein, 26 aa, Homo Sapiens
LGLGRNGIRNHRNPETLQLKFVVIGK

SEQ ID NO: 1288 - protein, 162 aa, Homo Sapiens
QPQFQRQRQHRLRLRFPLRLQPHPQTLRQQRLQLRLLARPRPQRKLQRRPQRPLCLVLLFQGPSPAAAWSGCTQSFWPPLWTATRDATRVLPELSGPCWELSTNTQWRSPIAFQCRTMSQKMKWLLTWNLLRICMNCIKKFLQMSSSWAGTLRAMTSQSTLC

SEQ ID NO: 1289 - protein, 4 aa, Homo Sapiens
WVWL

SEQ ID NO: 1290 - protein, 10 aa, Homo Sapiens
VKKRIFPLKH

SEQ ID NO: 1291 - protein, 13 aa, Homo Sapiens
ISPLSTCLKKCRL

SEQ ID NO: 1292 - protein, 21 aa, Homo Sapiens
LTLGATSSCSPRTSRWATSAL

SEQ ID NO: 1293 - protein, 1 aa, Homo Sapiens
L

SEQ ID NO: 1294 - protein, 15 aa, Homo Sapiens
LTCGIRARLTTMSPT

SEQ ID NO: 1295 - protein, 28 aa, Homo Sapiens
GDPWGSASSLAMRVESSTSIVPSLERCW

SEQ ID NO: 1296 - protein, 17 aa, Homo Sapiens
MRVESSTSIVPSLERCW

SEQ ID NO: 1297 - protein, 10 aa, Homo Sapiens
SIVPSLERCW

SEQ ID NO: 1298 - protein, 1 aa, Homo Sapiens
W

SEQ ID NO: 1299 - protein, 1 aa, Homo Sapiens
T

SEQ ID NO: 1300 - protein, 47 aa, Homo Sapiens
RTTQPSFLTPQLLNIRRLSGQNVLSTQLPSPPTMTMWSWAVVRKPWM

SEQ ID NO: 1301 - protein, 42 aa, Homo Sapiens
SFLTPQLLNIRRLSGQNVLSTQLPSPPTMTMWSWAVVRKPWM

SEQ ID NO: 1302 - protein, 28 aa, Homo Sapiens
WNMAPNSLEEPLQGKEARHIWAYLSLIL

SEQ ID NO: 1303 - protein, 13 aa, Homo Sapiens
EARHIWAYLSLIL

SEQ ID NO: 1304 - protein, 14 aa, Homo Sapiens
LNSWRRSMGQTEFF

SEQ ID NO: 1305 - protein, 19 aa, Homo Sapiens
LILSLELATKEMEVYMAGI

SEQ ID NO: 1306 - protein, 15 aa, Homo Sapiens
HRVLRRRPATWCTPM

SEQ ID NO: 1307 - protein, 1 aa, Homo Sapiens
G

SEQ ID NO: 1308 - protein, 7 aa, Homo Sapiens
LMLSGML

SEQ ID NO: 1309 - skipped

SEQ ID NO: 1310 - protein, 4 aa, Homo Sapiens
MSTF

SEQ ID NO: 1311 - skipped

SEQ ID NO: 1312 - protein, 16 aa, Homo Sapiens
MPSPTREGPKRNLHQH

SEQ ID NO: 1313 - protein, 3 aa, Homo Sapiens
WAY

SEQ ID NO: 1314 - protein, 36 aa, Homo Sapiens
PEPTRSCRKLTESTRKCTRLIWRRTLFRTHLVTSAS

SEQ ID NO: 1315 - protein, 1 aa, Homo Sapiens
S

SEQ ID NO: 1316 - protein, 14 aa, Homo Sapiens
RVEEQRMALSLIMN

SEQ ID NO: 1317 - protein, 6 aa, Homo Sapiens
LSLIMN

SEQ ID NO: 1318 - protein, 5 aa, Homo Sapiens
SGSAS

SEQ ID NO: 1319 - protein, 38 aa, Homo Sapiens
SGACPTSRKYLIGTRVTALMTCWKASGKRLKETWKMLS

SEQ ID NO: 1320 - protein, 33 aa, Homo Sapiens
TSRKYLIGTRVTALMTCWKASGKRLKETWKMLS

SEQ ID NO: 1321 - protein, 20 aa, Homo Sapiens
LMTCWKASGKRLKETWKMLS

SEQ ID NO: 1322 - protein, 27 aa, Homo Sapiens
WRVITLHPQVHMGLSKPILTLMLSGML

SEQ ID NO: 1323 - protein, 15 aa, Homo Sapiens
AMCLGFIHPTLKLTY

SEQ ID NO: 1324 - protein, 36 aa, Homo Sapiens
MKKWSIQTCLSARTGLSISCTTLNSPPLKKMSMPAV

SEQ ID NO: 1325 - protein, 5 aa, Homo Sapiens
CHSPR

SEQ ID NO: 1326 - protein, 3 aa, Homo Sapiens
PSA

SEQ ID NO: 1327 - protein, 11 aa, Homo Sapiens
LCSYMSCWMRF

SEQ ID NO: 1328 - protein, 11 aa, Homo Sapiens
LATHRIPRQAR

SEQ ID NO: 1329 - protein, 22 aa, Homo Sapiens
MAGGERVSSIVGMSSSWMCWRV

SEQ ID NO: 1330 - protein, 22 aa, Homo Sapiens
SPRVLTLSTSSQKKEGRITPWG

SEQ ID NO: 1331 - protein, 28 aa, Homo Sapiens
MGIPVAQSDLFTQWPIIKTNWDLRMDQF

SEQ ID NO: 1332 - protein, 12 aa, Homo Sapiens
TSMNLMDECLFR

SEQ ID NO: 1333 - protein, 9 aa, Homo Sapiens
SRNSTRKRR

SEQ ID NO: 1334 - protein, 29 aa, Homo Sapiens [sequence omitted]

SEQ ID NO: 1335 - protein, 29 aa, Homo Sapiens
LAKRSMPHQPYLKLLERLWELSTELQKSL

SEQ ID NO: 1336 - protein, 11 aa, Homo Sapiens
WELSTELQKSL

SEQ ID NO: 1337 - protein, 38 aa, Homo Sapiens
ACSLPKTCARGLLIALSPSLVSRPLPRLAISLLYFLSL

SEQ ID NO: 1338 - protein, 28 aa, Homo Sapiens
LGYGCCWRLCFKRCLLLGQSFHRRHAES

SEQ ID NO: 1339 - protein, 22 aa, Homo Sapiens
WRLCFKRCLLLGQSFHRRHAES

SEQ ID NO: 1340 - protein, 12 aa, Homo Sapiens
LGQSFHRRHAES

SEQ ID NO: 1341 - protein, 37 aa, Homo Sapiens
VDENWEGSLKSKLLLGVINPNCSEDCKSSMSVVQTLY

SEQ ID NO: 1342 - protein, 33 aa, Homo Sapiens
WEGSLKSKLLLGVINPNCSEDCKSSMSVVQTLY

SEQ ID NO: 1343 - protein, 24 aa, Homo Sapiens
LLGVINPNCSEDCKSSMSVVQTLY

SEQ ID NO: 1344 - protein, 10 aa, Homo Sapiens
WTTMGTLLKN

SEQ ID NO: 1345 - protein, 41 aa, Homo Sapiens
VMPLEYCSNVVLLPLSIIFRQQLTKTSQLTLQKSMPSFLQH

SEQ ID NO: 1346 - protein, 58 aa, Homo Sapiens
MQRRTRRMSTRSTTSPRPRRASRRSRSWTRTTRACESTRRPCWAAWPFPQTPTSPTSW

SEQ ID NO: 1347 - protein, 7 aa, Homo Sapiens
RAPWSWT

SEQ ID NO: 1348 - protein, 10 aa, Homo Sapiens
WRASRSSRLC

SEQ ID NO: 1349 - protein, 5 aa, Homo Sapiens
RSTSS

SEQ ID NO: 1350 - protein, 51 aa, Homo Sapiens
LANSFSVPASSTVTRRKIKVCRQARMHAFMLCRPVSSLSATKARRWWCSSR

SEQ ID NO: 1351 - protein, 24 aa, Homo Sapiens
LVPTSVALAPRRFMSSSTTRARTC

SEQ ID NO: 1352 - protein, 6 aa, Homo Sapiens
QTTPMR

SEQ ID NO: 1353 - protein, 8 aa, Homo Sapiens
GTSCHPRR

SEQ ID NO: 1354 - protein, 17 aa, Homo Sapiens
WEPCPRGPCRMPPSMAT

SEQ ID NO: 1355 - protein, 25 aa, Homo Sapiens
LVHLDLEEVGQGPYLERSLETLGRN

SEQ ID NO: 1356 - protein, 7 aa, Homo Sapiens
VKCMKNI

SEQ ID NO: 1357 - protein, 10 aa, Homo Sapiens
MGWQSFWISM

SEQ ID NO: 1358 - protein, 4 aa, Homo Sapiens
WISM

SEQ ID NO: 1359 - protein, 7 aa, Homo Sapiens
GAGMLRS

SEQ ID NO: 1360 - protein, 31 aa, Homo Sapiens
EANVGSSSTLPVWLPSRVRLDKLHTLLPRGE

SEQ ID NO: 1361 - protein, 47 aa, Homo Sapiens
MGISTLLWSRNLMWRQSFRSMAKLWAALFIRALPSFSMLMREMPGLL

SEQ ID NO: 1362 - protein, 24 aa, Homo Sapiens
MWAALFIRALPSFSMLMREMPGLL

SEQ ID NO: 1363 - protein, 15 aa, Homo Sapiens
LPSFSMLMREMPGLL

SEQ ID NO: 1364 - skipped

SEQ ID NO: 1365 - protein, 33 aa, Homo Sapiens
PLLTWTMTFNGTIMIGCTVTQHVYLLLLLLLGL

SEQ ID NO: 1366 - protein, 13 aa, Homo Sapiens
NITFLAQILLWIR

SEQ ID NO: 1367 - protein, 17 aa, Homo Sapiens
MMKMTIKLELRPRRIVT

SEQ ID NO: 1368 - protein, 10 aa, Homo Sapiens
MELRPRRIVT

SEQ ID NO: 1369 - protein, 45 aa, Homo Sapiens
LVPEEAQEEGSGPLYHISHLTSICVKWPFPGSSQHLMKLPSVRPC

SEQ ID NO: 1370 - protein, 32 aa, Homo Sapiens
LYHISHLTSICVKWPFPGSSQHLMKLPSVRPC

SEQ ID NO: 1371 - protein, 22 aa, Homo Sapiens
CVKWPFPGSSQHLMKLPSVRPC

SEQ ID NO: 1372 - protein, 24 aa, Homo Sapiens
MWLQGHLKCKLKKFDRWDPIKRGQ

SEQ ID NO: 1373 - protein, 19 aa, Homo Sapiens
HLKCKLKKFDRWDPIKRGQ

SEQ ID NO: 1374 - protein, 9 aa, Homo Sapiens
WISKYCRVP

SEQ ID NO: 1375 - protein, 37 aa, Homo Sapiens
WRNFTMIREAMMATVTACSPGCTAVACCSTQMPWSTC

SEQ ID NO: 1376 - protein, 51 aa, Homo Sapiens
LSSTSECLEPECMLLISGQEECTRTYPLGLWMTFISFLRTSLFGLMSWRSC

SEQ ID NO: 1377 - protein, 33 aa, Homo Sapiens
QEECTRTYPLGLWMTFISFLRTSLFGLMSWRSC

SEQ ID NO: 1378 - protein, 30 aa, Homo Sapiens
LGELLCTQAKKQPTGSLHLGMMWTLQRTQL

SEQ ID NO: 1379 - protein, 7 aa, Homo Sapiens
LEKSHVC

SEQ ID NO: 1380 - protein, 23 aa, Homo Sapiens
LESMWLKSCPSMSNKFRCPASMS

SEQ ID NO: 1381 - protein, 10 aa, Homo Sapiens
LGDPPFCCCR

SEQ ID NO: 1382 - protein, 29 aa, Homo Sapiens
TAGEGSHLTTCGDPMGVDHSIPTLLCREK

SEQ ID NO: 1383 - protein, 8 aa, Homo Sapiens
VQENKVDQ

SEQ ID NO: 1384 - protein, 12 aa, Homo Sapiens
LARSWISWYHGA

SEQ ID NO: 1385 - protein, 41 aa, Homo Sapiens
LSSSRRSAAPPTPCAPCRVSLSMTNLCVSSMPRPTQISLPR

SEQ ID NO: 1386 - protein, 22 aa, Homo Sapiens
WMNVIRCLNSSTCVGMSRKFFA

SEQ ID NO: 1387 - protein, 19 aa, Homo Sapiens
LSWPHCNSWSQLLGRCLYW

SEQ ID NO: 1388 - protein, 4 aa, Homo Sapiens
RLGS

SEQ ID NO: 1389 - protein, 1 aa, Homo Sapiens
D

SEQ ID NO: 1390 - protein, 25 aa, Homo Sapiens
LVMVIPHHRMDSHSLALGTACEMKR

SEQ ID NO: 1391 - protein, 14 aa, Homo Sapiens
LSVTFGQKSMKTTA

SEQ ID NO: 1392 - protein, 46 aa, Homo Sapiens
ASVSTTFWETHGAFSSPTLGTLPQCAPQSLAELQSWHQNLPRGMLS

SEQ ID NO: 1393 - protein, 16 aa, Homo Sapiens
AELQSWHQNLPRGMLS

SEQ ID NO: 1394 - protein, 7 aa, Homo Sapiens
LPRGMLS

SEQ ID NO: 1395 - protein, 4 aa, Homo Sapiens
MPFQ

SEQ ID NO: 1396 - protein, 38 aa, Homo Sapiens
VKSPQKSYLFPSSMIGIGSLPSCWACWIQQRRMKRACL

SEQ ID NO: 1397 - protein, 15 aa, Homo Sapiens
WACWIQQRRMKRACL

SEQ ID NO: 1398 - protein, 8 aa, Homo Sapiens
LFLVLIRS

SEQ ID NO: 1399 - protein, 6 aa, Homo Sapiens
GRMGIV

SEQ ID NO: 1400 - protein, 129 aa, Homo Sapiens
SLKKKPKNFSRKESSPKSSHLARNTSATHPSLKSLGEAGAVSQRMSAANCVFLQQFHKHILVSSQPRFLGCYTNGLLNENGTKSFLRFFILSAFSNQFHSYISTLLVLFEICSVFKTQILLDLCRACDQ

SEQ ID NO: 1401 - protein, 21 aa, Homo Sapiens
LFRAPMAQPASLLPTPLDTWI

SEQ ID NO: 1402 - protein, 69 aa, Homo Sapiens
LWSLWMNISLWSACYRLPGSQIPQSMNIILPLVAGSLPETPHPTCLTLYDALGCTTSPSTRTSRMATGR

SEQ ID NO: 1403 - protein, 5 aa, Homo Sapiens
VWSRS

SEQ ID NO: 1404 - protein, 7 aa, Homo Sapiens
CLLPCTI

SEQ ID NO: 1405 - protein, 18 aa, Homo Sapiens
CGEPYTHYCKIPPTSLRS

SEQ ID NO: 1406 - protein, 5 aa, Homo Sapiens
TSLRS

SEQ ID NO: 1407 - protein, 41 aa, Homo Sapiens
CTQRFLMFLRKSLKMQHIESIQNRLQMRSWLWLKRNQMLKN

SEQ ID NO: 1408 - protein, 4 aa, Homo Sapiens
QYNY

SEQ ID NO: 1409 - protein, 21 aa, Homo Sapiens
LEQQDSWGDMLSTTLDAWGHR

SEQ ID NO: 1410 - protein, 5 aa, Homo Sapiens
LRMFL

SEQ ID NO: 1411 - protein, 1 aa, Homo Sapiens
L

SEQ ID NO: 1412 - protein, 3 aa, Homo Sapiens
ERK

SEQ ID NO: 1413 - protein, 20 aa, Homo Sapiens
WTKWRLSWPWKTNLGLKFLI

SEQ ID NO: 1414 - protein, 35 aa, Homo Sapiens
LRRCPGSGCWPWPGLSAPLSAPRGPRRGSGLCSRP

SEQ ID NO: 1415 - protein, 38 aa, Homo Sapiens [sequence omitted]

SEQ ID NO: 1416 - protein, 39 aa, Homo Sapiens
SWATRTRPPSGPPSPGKRSSTSRQLRWVSWLAKTGQVFT

SEQ ID NO: 1417 - skipped

SEQ ID NO: 1418 - protein, 83 aa, Homo Sapiens
PTFGVPSTDLVCPFPFTAPHSFAPLSSPYTHKPFYFLGHYPIPLIAAKTTWAGGQGWMDRHLPLPISLPCVVGKLLFFGVFFF

SEQ ID NO: 1419 - protein, 28 aa, Homo Sapiens
LMLDECWEFRGMSSLILGFALFPFLIVV

SEQ ID NO: 1420 - protein, 73 aa, Homo Sapiens
VPQHPQRPHPQLPQSPLHPSRLPPPQACPIPHLPPERTRAHQRNPPPRRPQSLCQALFPLQVAAGERKTRPPR

SEQ ID NO: 1421 - protein, 2 aa, Homo Sapiens
PR

SEQ ID NO: 1422 - protein, 3 aa, Homo Sapiens
ERC

SEQ ID NO: 1423 - protein, 14 aa, Homo Sapiens
LSPLPPWSRAPHSC

SEQ ID NO: 1424 - protein, 13 aa, Homo Sapiens
LGASSLVMPGTLL

SEQ ID NO: 1425 - protein, 1 aa, Homo Sapiens
V

SEQ ID NO: 1426 - protein, 7 aa, Homo Sapiens
APADPAP

SEQ ID NO: 1427 - protein, 21 aa, Homo Sapiens
LEATSTWRPSVPLLTAEAVCW

SEQ ID NO: 1428 - protein, 32 aa, Homo Sapiens
LTRRKRLSLTITTMTSQTLASIRSSWLTLRTC

SEQ ID NO: 1429 - protein, 13 aa, Homo Sapiens
WWPILITLWCWTS

SEQ ID NO: 1430 - protein, 6 aa, Homo Sapiens
LVSALT

SEQ ID NO: 1431 - protein, 9 aa, Homo Sapiens
GKALPLPAG

SEQ ID NO: 1432 - protein, 1 aa, Homo Sapiens
W

SEQ ID NO: 1433 - protein, 48 aa, Homo Sapiens
SVRCRRLAKRTWWVCSKIPTCVPSTLRESPSCPKTSSWLAGYGERELK

SEQ ID NO: 1434 - protein, 8 aa, Homo Sapiens
GYGERELK

SEQ ID NO: 1435 - protein, 5 aa, Homo Sapiens
WSKNA

SEQ ID NO: 1436 - protein, 3 aa, Homo Sapiens
MPS

SEQ ID NO: 1437 - protein, 8 aa, Homo Sapiens
WTKSGMKA

SEQ ID NO: 1438 - protein, 7 aa, Homo Sapiens
MWILELE

SEQ ID NO: 1439 - protein, 11 aa, Homo Sapiens
VFILLIWLLRK

SEQ ID NO: 1440 - protein, 5 aa, Homo Sapiens
WLLRK

SEQ ID NO: 1441 - protein, 1 aa, Homo Sapiens
M

SEQ ID NO: 1442 - protein, 9 aa, Homo Sapiens
LWRRNVIKK

SEQ ID NO: 1443 - protein, 36 aa, Homo Sapiens
ATRESKSHRTSRRGAAFSDVFFCEEHRLTLSLAQPS

SEQ ID NO: 1444 - protein, 33 aa, Homo Sapiens
ESKSHRTSRRGAAFSDVFFCEEHRLTLSLAQPS

SEQ ID NO: 1445 - protein, 87 aa, Homo Sapiens
WKPLTWILHSGESMSSPTPGPQPTWPSTQPFCNLTTGSWGWTCPMGAISPTATCLTSSGYQPRPSSSSLCPISSTPKLASLTTTSWH

SEQ ID NO: 1446 - protein, 63 aa, Homo Sapiens
WPSTQPFCNLTTGSWGWTCPMGAISPTATCLTSSGYQPRPSSSSLCPISSTPKLASLTTTSWH

SEQ ID NO: 1447 - protein, 61 aa, Homo Sapiens
STQPFCNLTTGSWGWTCPMGAISPTATCLTSSGYQPRPSSSSLCPISSTPKLASLTTTSWH

SEQ ID NO: 1448 - protein, 54 aa, Homo Sapiens
LTTGSWGWTCPMGAISPTATCLTSSGYQPRPSSSSLCPISSTPKLASLTTTSWH

SEQ ID NO: 1449 - protein, 35 aa, Homo Sapiens
TCLTSSGYQPRPSSSSLCPISSTPKLASLTTTSWH

SEQ ID NO: 1450 - protein, 25 aa, Homo Sapiens
RPSSSSLCPISSTPKLASLTTTSWH

SEQ ID NO: 1451 - protein, 31 aa, Homo Sapiens
PGLPAAGCSRLELSPPLGCWECRVVSWTCLG

SEQ ID NO: 1452 - protein, 2 aa, Homo Sapiens
LG

SEQ ID NO: 1453 - protein, 21 aa, Homo Sapiens
QRSTSPWGSPLGVPHLAATRS

SEQ ID NO: 1454 - protein, 2 aa, Homo Sapiens
MS

SEQ ID NO: 1455 - protein, 10 aa, Homo Sapiens
LATMDTHLPI

SEQ ID NO: 1456 - protein, 1 aa, Homo Sapiens
L

SEQ ID NO: 1457 - protein, 44 aa, Homo Sapiens
LSRCCQIRTAAMPSMMQPMRPRRARRRIWCLSSGPPSLRPLRAK

SEQ ID NO: 1458 - protein, 82 aa, Homo Sapiens
APWQRSWGAVPSSPWRASLCEPLLAPCLEHLAAPHLPLGVAGCPLPARPEGLGGSQQGEGNPFTPVAKQTPHPLDFPSPSIP

SEQ ID NO: 1459 - protein, 16 aa, Homo Sapiens
ALMCLSQLEKPETAVL

SEQ ID NO: 1460 - protein, 7 aa, Homo Sapiens
TPHRFSE

SEQ ID NO: 1461 - protein, 7 aa, Homo Sapiens
SLTMRPP

SEQ ID NO: 1462 - protein, 13 aa, Homo Sapiens
LLNLNQKMKSNWP

SEQ ID NO: 1463 - protein, 14 aa, Homo Sapiens
GVRGRPSCSLLHRK

SEQ ID NO: 1464 - protein, 102 aa, Homo Sapiens
AVVAWVVHVEELALAAAVCMAWGAPRGSPLEGAAVPSVAAMAAEPEAAMALVAPGVDLVSVVEPALALVWVVEPALLVALGALASLCAPLEASKRSPSTRVS

SEQ ID NO: 1465 - protein, 2 aa, Homo Sapiens
LS

SEQ ID NO: 1466 - protein, 36 aa, Homo Sapiens
VPNWNVCERRISTLKKCGRTKNPKTLLTRLKLTNLF

SEQ ID NO: 1467 - protein, 34 aa, Homo Sapiens
NWNVCERRISTLKKCGRTKNPKTLLTRLKLTNLF

SEQ ID NO: 1468 - protein, 30 aa, Homo Sapiens
CERRISTLKKCGRTKNPKTLLTRLKLTNLF

SEQ ID NO: 1469 - protein, 12 aa, Homo Sapiens
LVLLAWPVPSVS

SEQ ID NO: 1470 - protein, 6 aa, Homo Sapiens
MSSKTN

SEQ ID NO: 1471 - skipped

SEQ ID NO: 1472 - protein, 8 aa, Homo Sapiens
MSLAKTIM

SEQ ID NO: 1473 - protein, 5 aa, Homo Sapiens
WSSVT

SEQ ID NO: 1474 - skipped

SEQ ID NO: 1475 - protein, 10 aa, Homo Sapiens
CLLFQIQWIS

SEQ ID NO: 1476 - protein, 8 aa, Homo Sapiens
MFQIQWIS

SEQ ID NO: 1477 - protein, 4 aa, Homo Sapiens
DSVT

SEQ ID NO: 1478 - protein, 4 aa, Homo Sapiens
MDSL

SEQ ID NO: 1479 - protein, 4 aa, Homo Sapiens
WQRV

SEQ ID NO: 1480 - protein, 9 aa, Homo Sapiens
WDRMESQTL

SEQ ID NO: 1481 - protein, 21 aa, Homo Sapiens
SSRRPLARSLTASGAATCPSA

SEQ ID NO: 1482 - protein, 4 aa, Homo Sapiens
TRSS

SEQ ID NO: 1483 - protein, 16 aa, Homo Sapiens
TWRPRPCGRSRAAMSP

SEQ ID NO: 1484 - protein, 53 aa, Homo Sapiens
NRVGVKRRHGRLCPNWVFGRLQELLESLSGNLRISSLSSQNQMSTRALLQILT

SEQ ID NO: 1485 - protein, 17 aa, Homo Sapiens
LSSQNQMSTRALLQILT

SEQ ID NO: 1486 - protein, 14 aa, Homo Sapiens
LGKPRSKIYPSKHN

SEQ ID NO: 1487 - protein, 1 aa, Homo Sapiens
M

SEQ ID NO: 1488 - protein, 15 aa, Homo Sapiens
LSMSLIFLARKPSAV

SEQ ID NO: 1489 - protein, 8 aa, Homo Sapiens
SEPLPARV

SEQ ID NO: 1490 - protein, 27 aa, Homo Sapiens
CQKLLLLSLTMEISIPDCIQSSLNTWG

SEQ ID NO: 1491 - skipped

SEQ ID NO: 1492 - protein, 16 aa, Homo Sapiens
ALPWTTSSDSLSPTVR

SEQ ID NO: 1493 - protein, 27 aa, Homo Sapiens
MWMKPSITSRPMSSSKTMKLRMKLIGP

SEQ ID NO: 1494 - protein, 1 aa, Homo Sapiens
L

SEQ ID NO: 1495 - protein, 36 aa, Homo Sapiens
RVFQDLDSEGSPGSHRLQSPGQHFPARCTQSFAFIS

SEQ ID NO: 1496 - protein, 97 aa, Homo Sapiens
WDMFTEQRWKMRLIAAFRKCIRPTMEPTLMLLAGLLIMYRDSCIVVEFTTTQTGKIQIGSKKPKTRVSLLAAAERLPAIVMAAWPTLPTSMLRGVRL

SEQ ID NO: 1497 - protein, 38 aa, Homo Sapiens
APAARAPATRPLPPPPGTRSCTWTWTPTGSRSAAWCWS

SEQ ID NO: 1498 - protein, 20 aa, Homo Sapiens
LDPTKTDQKITKVAELVKPL

SEQ ID NO: 1499 - protein, 27 aa, Homo Sapiens
LLCCFSAFPSFLLKDGRRFSSPGWWSC

SEQ ID NO: 1500 - protein, 1 aa, Homo Sapiens
C

SEQ ID NO: 1501 - protein, 24 aa, Homo Sapiens
LWFSLSSLCCWSSMPCAKFGSMMM

SEQ ID NO: 1502 - protein, 27 aa, Homo Sapiens
RSTWRRMTSSRRELLLTEASWMSGMLR

SEQ ID NO: 1503 - skipped

SEQ ID NO: 1504 - protein, 139 aa, Homo Sapiens
LRLQEPLVPHPWLAWPLSRRRRRRLPLEPLLLPLRALRPNLCLWLLRRVLVLRVPAWPHLVAAPAQGWRWWLLRVPQPQVVAREPWMTVPPFAVSARSQAIWLCATSVSFVSTWTVTCRPCRMYQGRSGAAHSAMCSLT

SEQ ID NO: 1505 - protein, 29 aa, Homo Sapiens
VSTWTVTCRPCRMYQGRSGAAHSAMCSLT

SEQ ID NO: 1506 - protein, 13 aa, Homo Sapiens
RSGAAHSAMCSLT

SEQ ID NO: 1507 - protein, 24 aa, Homo Sapiens
VRAVILSPAETASSMPTRTTSTSS

SEQ ID NO: 1508 - protein, 3 aa, Homo Sapiens
GTL

SEQ ID NO: 1509 - protein, 3 aa, Homo Sapiens
LMS

SEQ ID NO: 1510 - protein, 22 aa, Homo Sapiens
VQQSGLHWVSICPSWHIIFGGI

SEQ ID NO: 1511 - protein, 3 aa, Homo Sapiens
GGI

SEQ ID NO: 1512 - protein, 8 aa, Homo Sapiens
VRRKDGAN

SEQ ID NO: 1513 - protein, 1 aa, Homo Sapiens
W

SEQ ID NO: 1514 - protein, 26 aa, Homo Sapiens
WILKFKNWIRWMRMNWNALKKRDSRH

SEQ ID NO: 1515 - protein, 11 aa, Homo Sapiens
WNALKKRDSRH

SEQ ID NO: 1516 - protein, 41 aa, Homo Sapiens
FLKDMGNTEKSLVKETFFKKSRRVKMWFAISTETPHSGVKY

SEQ ID NO: 1517 - protein, 13 aa, Homo Sapiens
AISTETPHSGVKY

SEQ ID NO: 1518 - skipped

SEQ ID NO: 1519 - protein, 6 aa, Homo Sapiens
LPAMVL

SEQ ID NO: 1520 - protein, 40 aa, Homo Sapiens
WITMKRKSPRLLKRAHQLPLRKTSRDPTFPSTALASGTFC

SEQ ID NO: 1521 - protein, 21 aa, Homo Sapiens
HLQMLLQWTQQNKSISLPWHC

SEQ ID NO: 1522 - protein, 5 aa, Homo Sapiens
LALTV

SEQ ID NO: 1523 - protein, 31 aa, Homo Sapiens
LIKVMKPLVCGKRLQRWWRRKLADTDLLRTT

SEQ ID NO: 1524 - protein, 22 aa, Homo Sapiens
WCQLEKVLLKLKQMSFLAMGAT

SEQ ID NO: 1525 - protein, 3 aa, Homo Sapiens
VQP

SEQ ID NO: 1526 - protein, 5 aa, Homo Sapiens
RTMLK

SEQ ID NO: 1527 - protein, 11 aa, Homo Sapiens
CSTPMPRLWPP

SEQ ID NO: 1528 - protein, 8 aa, Homo Sapiens
VPSTARKP

SEQ ID NO: 1529 - protein, 5 aa, Homo Sapiens
TKSSA

SEQ ID NO: 1530 - protein, 74 aa, Homo Sapiens
RLHLSSPQAQPKADEDRPAEIGWRTVLCPQVLSLHRNLNSRMEFFLLCWDSFAWQGLISPLARGSLCSIFFNLK

SEQ ID NO: 1531 - protein, 63 aa, Homo Sapiens
WRQRRKMSSTRRLMGVSQRNPEMMSIKGTSQTQRTKWTLTLTLMKGMNHPVMEKQKSQEGSAE

SEQ ID NO: 1532 - protein, 1 aa, Homo Sapiens
H

SEQ ID NO: 1533 - protein, 13 aa, Homo Sapiens
MQISSEHVWDPSP

SEQ ID NO: 1534 - protein, 5 aa, Homo Sapiens
WDPSP

SEQ ID NO: 1535 - protein, 7 aa, Homo Sapiens
WTQWEAL

SEQ ID NO: 1536 - protein, 1 aa, Homo Sapiens
M

SEQ ID NO: 1537 - protein, 6 aa, Homo Sapiens
EMGPHQ

SEQ ID NO: 1538 - protein, 5 aa, Homo Sapiens
RHWMI

SEQ ID NO: 1539 - protein, 3 aa, Homo Sapiens
WMI

SEQ ID NO: 1540 - protein, 10 aa, Homo Sapiens
LRRMVGKRLT

SEQ ID NO: 1541 - protein, 128 aa, Homo Sapiens
AWNMGFSLMGRCPVTRPLVEGTTPSPPSSVKLVLENTYPGQFLWIWSLRSLMRSEMAHTDSSSTQSSSSLGKRMLPTTMPVVTIPLARRSLTQCWIGSASCLTSAQDFRASWCSTALVGALALASPHS

SEQ ID NO: 1542 - protein, 86 aa, Homo Sapiens
LWIWSLRSLMRSEMAHTDSSSTQSSSSLGKRMLPTTMPVVTIPLARRSLTQCWIGSASCLTSAQDFRASWCSTALVGALALASPHS

SEQ ID NO: 1543 - protein, 26 aa, Homo Sapiens
MGEEMIPSTPSSVRRGLASMCPGQCL

SEQ ID NO: 1544 - protein, 1 aa, Homo Sapiens
L

SEQ ID NO: 1545 - protein, 47 aa, Homo Sapiens
ASWFSTALVGELVLGSPRCSWNVSQLIMARSPSWSSLFTRRPRFPQL

SEQ ID NO: 1546 - protein, 28 aa, Homo Sapiens
VFLIWEDFTRTSKTEMSHSHQPLLKTNL

SEQ ID NO: 1547 - protein, 43 aa, Homo Sapiens
LTWGGKRQKWMSFRFVATWCQMNMSSCPLKPWRLPEFVPISTW

SEQ ID NO: 1548 - protein, 28 aa, Homo Sapiens
VATWCQMNMSSCPLKPWRLPEFVPISTW

SEQ ID NO: 1549 - protein, 8 aa, Homo Sapiens
EFVPISTW

SEQ ID NO: 1550 - protein, 6 aa, Homo Sapiens
VPISTW

SEQ ID NO: 1551 - protein, 57 aa, Homo Sapiens
STPSTSSASTRCCPVLGLTGSKQACEVPLESPRALWPGFTLAKLSCPSAPSCRTRSM

SEQ ID NO: 1552 - protein, 24 aa, Homo Sapiens
ALWPGFTLAKLSCPSAPSCRTRSM

SEQ ID NO: 1553 - protein, 19 aa, Homo Sapiens
FTLAKLSCPSAPSCRTRSM

SEQ ID NO: 1554 - protein, 17 aa, Homo Sapiens
MAKLSCPSAPSCRTRSM

SEQ ID NO: 1555 - protein, 15 aa, Homo Sapiens
KLSCPSAPSCRTRSM

SEQ ID NO: 1556 - protein, 115 aa, Homo Sapiens
SSSFLAARRSTSQRSGASPSSMLMNLKTWWLKSGSSQMAVGSSTSPVVALWTSGGPCTHEGFQCAAPLLILTNKFYFLSTYVFVSTFLTGKELPLGTFGSLPFHFRNRLTTQPCS

SEQ ID NO: 1557 - protein, 109 aa, Homo Sapiens
ARRSTSQRSGASPSSMLMNLKTWWLKSGSSQMAVGSSTSPVVALWTSGGPCTHEGFQCAAPLLILTNKFYFLSTYVFVSTFLTGKELPLGTFGSLPFHFRNRLTTQPCS

SEQ ID NO: 1558 - protein, 108 aa, Homo Sapiens
RRSTSQRSGASPSSMLMNLKTWWLKSGSSQMAVGSSTSPVVALWTSGGPCTHEGFQCAAPLLILTNKFYFLSTYVFVSTFLTGKELPLGTFGSLPFHFRNRLTTQPCS

SEQ ID NO: 1559 - protein, 85 aa, Homo Sapiens
VKSGSSQMAVGSSTSPVVALWTSGGPCTHEGFQCAAPLLILTNKFYFLSTYVFVSTFLTGKELPLGTFGSLPFHFRNRLTTQPCS

SEQ ID NO: 1560 - protein, 81 aa, Homo Sapiens
SSQMAVGSSTSPVVALWTSGGPCTHEGFQCAAPLLILTNKFYFLSTYVFVSTFLTGKELPLGTFGSLPFHFRNRLTTQPCS

SEQ ID NO: 1561 - protein, 76 aa, Homo Sapiens
VGSSTSPVVALWTSGGPCTHEGFQCAAPLLILTNKFYFLSTYVFVSTFLTGKELPLGTFGSLPFHFRNRLTTQPCS

SEQ ID NO: 1562 - protein, 69 aa, Homo Sapiens
VTGIVRTSRTQSLASAEVSLMPRFAFLTWGGKRQKWMSFRFVATWCQMNMSSCPLKPWRLPEFVPISTW

SEQ ID NO: 1563 - protein, 73 aa, Homo Sapiens
STSPVVALWTSGGPCTHEGFQCAAPLLILTNKFYFLSTYVFVSTFLTGKELPLGTFGSLPFHFRNRLTTQPCS

SEQ ID NO: 1564 - protein, 69 aa, Homo Sapiens
VVALWTSGGPCTHEGFQCAAPLLILTNKFYFLSTYVFVSTFLTGKELPLGTFGSLPFHFRNRLTTQPCS

SEQ ID NO: 1565 - protein, 66 aa, Homo Sapiens
LWTSGGPCTHEGFQCAAPLLILTNKFYFLSTYVFVSTFLTGKELPLGTFGSLPFHFRNRLTTQPCS

SEQ ID NO: 1566 - protein, 61 aa, Homo Sapiens
GPCTHEGFQCAAPLLILTNKFYFLSTYVFVSTFLTGKELPLGTFGSLPFHFRNRLTTQPCS

SEQ ID NO: 1567 - protein, 59 aa, Homo Sapiens
CTHEGFQCAAPLLILTNKFYFLSTYVFVSTFLTGKELPLGTFGSLPFHFRNRLTTQPCS

SEQ ID NO: 1568 - protein, 65 aa, Homo Sapiens
VRTSRTQSLASAEVSLMPRFAFLTWGGKRQKWMSFRFVATWCQMNMSSCPLKPWRLPEFVPISTW

SEQ ID NO: 1569 - protein, 45 aa, Homo Sapiens
LSRKTSLLVFLKETTHNTMIIFLNKRKKFADAYKTFSRNTYSTNS

SEQ ID NO: 1570 - protein, 3 aa, Homo Sapiens
TRW

SEQ ID NO: 1571 - protein, 40 aa, Homo Sapiens
SAASSLWIGAPLASRLASTTSLPLWCLVETWPRYRELCAC

SEQ ID NO: 1572 - protein, 35 aa, Homo Sapiens
LWIGAPLASRLASTTSLPLWCLVETWPRYRELCAC

SEQ ID NO: 1573 - protein, 8 aa, Homo Sapiens
RYRELCAC

SEQ ID NO: 1574 - protein, 69 aa, Homo Sapiens
LFTGTWVRGWRKASFQRPVKIWLPLRRIMRRLVWILLKERVRKKERNTNYPFLLALQHVMLPEFQLQLN

SEQ ID NO: 1575 - protein, 44 aa, Homo Sapiens
RRIMRRLVWILLKERVRKKERNTNYPFLLALQHVMLPEFQLQLN

SEQ ID NO: 1576 - protein, 37 aa, Homo Sapiens
VWILLKERVRKKERNTNYPFLLALQHVMLPEFQLQLN

SEQ ID NO: 1577 - protein, 58 aa, Homo Sapiens
ARLVSRLAMPAGSSTAWNTASSPMARCQVTRPLGEEMTPSTPSSVRRALASTCPGLCL

SEQ ID NO: 1578 - protein, 57 aa, Homo Sapiens
RLVSRLAMPAGSSTAWNTASSPMARCQVTRPLGEEMTPSTPSSVRRALASTCPGLCL

SEQ ID NO: 1579 - protein, 53 aa, Homo Sapiens
RLAMPAGSSTAWNTASSPMARCQVTRPLGEEMTPSTPSSVRRALASTCPGLCL

SEQ ID NO: 1580 - protein, 52 aa, Homo Sapiens
MAMPAGSSTAWNTASSPMARCQVTRPLGEEMTPSTPSSVRRALASTCPGLCL

SEQ ID NO: 1581 - protein, 33 aa, Homo Sapiens
RCQVTRPLGEEMTPSTPSSVRRALASTCPGLCL

SEQ ID NO: 1582 - protein, 26 aa, Homo Sapiens
MGEEMTPSTPSSVRRALASTCPGLCL

SEQ ID NO: 1583 - protein, 24 aa, Homo Sapiens
EEMTPSTPSSVRRALASTCPGLCL

SEQ ID NO: 1584 - protein, 1 aa, Homo Sapiens
L

SEQ ID NO: 1585 - protein, 106 aa, Homo Sapiens
MMKFALAPTASSSTLSSSSQARKMLPITMPEGTTPLARRSLTLCWTEFASWLTSAPVFRASWFSTALVGELVLGSPPCSWNVSQLIMARSPSWSSPFTQHPRFPQL

SEQ ID NO: 1586 - protein, 96 aa, Homo Sapiens
SSSTLSSSSQARKMLPITMPEGTTPLARRSLTLCWTEFASWLTSAPVFRASWFSTALVGELVLGSPPCSWNVSQLIMARSPSWSSPFTQHPRFPQL

SEQ ID NO: 1587 - protein, 80 aa, Homo Sapiens
ITMPEGTTPLARRSLTLCWTEFASWLTSAPVFRASWFSTALVGELVLGSPPCSWNVSQLIMARSPSWSSPFTQHPRFPQL

SEQ ID NO: 1588 - protein, 71 aa, Homo Sapiens
MARRSLTLCWTEFASWLTSAPVFRASWFSTALVGELVLGSPPCSWNVSQLIMARSPSWSSPFTQHPRFPQL

SEQ ID NO: 1589 - protein, 66 aa, Homo Sapiens
MTLCWTEFASWLTSAPVFRASWFSTALVGELVLGSPPCSWNVSQLIMARSPSWSSPFTQHPRFPQL

SEQ ID NO: 1590 - protein, 62 aa, Homo Sapiens
WTEFASWLTSAPVFRASWFSTALVGELVLGSPPCSWNVSQLIMARSPSWSSPFTQHPRFPQL

SEQ ID NO: 1591 - protein, 55 aa, Homo Sapiens
VTSAPVFRASWFSTALVGELVLGSPPCSWNVSQLIMARSPSWSSPFTQHPRFPQL

SEQ ID NO: 1592 - protein, 45 aa, Homo Sapiens
WFSTALVGELVLGSPPCSWNVSQLIMARSPSWSSPFTQHPRFPQL

SEQ ID NO: 1593 - protein, 40 aa, Homo Sapiens
LVGELVLGSPPCSWNVSQLIMARSPSWSSPFTQHPRFPQL

SEQ ID NO: 1594 - protein, 21 aa, Homo Sapiens
IMARSPSWSSPFTQHPRFPQL

SEQ ID NO: 1595 - protein, 5 aa, Homo Sapiens
RFPQL

SEQ ID NO: 1596 - protein, 3 aa, Homo Sapiens
PQL

SEQ ID NO: 1597 - protein, 19 aa, Homo Sapiens
TTPSSPPTPPWSTLIVPSW

SEQ ID NO: 1598 - protein, 17 aa, Homo Sapiens
PSSPPTPPWSTLIVPSW

SEQ ID NO: 1599 - protein, 12 aa, Homo Sapiens
TPPWSTLIVPSW

SEQ ID NO: 1600 - protein, 4 aa, Homo Sapiens
VPSW

SEQ ID NO: 1601 - protein, 2 aa, Homo Sapiens
SW

SEQ ID NO: 1602 - protein, 33 aa, Homo Sapiens
SMTSVVETSISSAQPTLTLTALLARLCPPSLLP

SEQ ID NO: 1603 - protein, 26 aa, Homo Sapiens
TSISSAQPTLTLTALLARLCPPSLLP

SEQ ID NO: 1604 - protein, 18 aa, Homo Sapiens
TLTLTALLARLCPPSLLP

SEQ ID NO: 1605 - protein, 13 aa, Homo Sapiens
ALLARLCPPSLLP

SEQ ID NO: 1606 - protein, 8 aa, Homo Sapiens
MCPPSLLP

SEQ ID NO: 1607 - protein, 5 aa, Homo Sapiens
PSLLP

SEQ ID NO: 1608 - protein, 4 aa, Homo Sapiens
LMEP

SEQ ID NO: 1609 - protein, 30 aa, Homo Sapiens
TWCPTPASTSLWPHMPLSSLLRKPTMNSFL

SEQ ID NO: 1610 - protein, 50 aa, Homo Sapiens
LHLPLHHLLSHVTMRCQGSTMRMKTQLHEGGKRKVIMPSYANKKLRERES

SEQ ID NO: 1611 - protein, 16 aa, Homo Sapiens
APLLRRTNQLQRREDS

SEQ ID NO: 1612 - protein, 20 aa, Homo Sapiens
LLCFKRYELRLPAKRKRKRN

SEQ ID NO: 1613 - protein, 2 aa, Homo Sapiens
GR

SEQ ID NO: 1614 - protein, 39 aa, Homo Sapiens
SGRSSGRTTSFSVRVVLGTTGPRGTTQKARSWWTRCWML

SEQ ID NO: 1615 - skipped

SEQ ID NO: 1616 - protein, 18 aa, Homo Sapiens
CQTQWWSPTTPPSQSTSS

SEQ ID NO: 1617 - protein, 9 aa, Homo Sapiens
KPPSQSTSS

SEQ ID NO: 1618 - protein, 6 aa, Homo Sapiens
SQSTSS

SEQ ID NO: 1619 - protein, 15 aa, Homo Sapiens
TALITKLSTTFASEP

SEQ ID NO: 1620 - protein, 1 aa, Homo Sapiens
G

SEQ ID NO: 1621 - protein, 10 aa, Homo Sapiens
LEIRPSSCGN

SEQ ID NO: 1622 - protein, 61 aa, Homo Sapiens
MRPTMEFHSVLCGVTPTLLVMWLSPQMASLPSQAPGMEPCASGISQRAPPRGDLWAIPRMC

SEQ ID NO: 1623 - protein, 44 aa, Homo Sapiens
LLVMWLSPQMASLPSQAPGMEPCASGISQRAPPRGDLWAIPRMC

SEQ ID NO: 1624 - protein, 32 aa, Homo Sapiens
LPSQAPGMEPCASGISQRAPPRGDLWAIPRMC

SEQ ID NO: 1625 - protein, 15 aa, Homo Sapiens
RAPPRGDLWAIPRMC

SEQ ID NO: 1626 - protein, 11 aa, Homo Sapiens
RGDLWAIPRMC

SEQ ID NO: 1627 - protein, 8 aa, Homo Sapiens
LWAIPRMC

SEQ ID NO: 1628 - protein, 71 aa, Homo Sapiens
SPLTTGRLSLDLEIKPSSYGIPWVCANTLSRMRATQSGCLVSASRPTAATLSSSPVAGTSWSRYGTWLTAS

SEQ ID NO: 1629 - protein, 64 aa, Homo Sapiens
MSLDLEIKPSSYGIPWVCANTLSRMRATQSGCLVSASRPTAATLSSSPVAGTSWSRYGTWLTAS

SEQ ID NO: 1630 - protein, 49 aa, Homo Sapiens
WVCANTLSRMRATQSGCLVSASRPTAATLSSSPVAGTSWSRYGTWLTAS

SEQ ID NO: 1631 - protein, 28 aa, Homo Sapiens
SRPTAATLSSSPVAGTSWSRYGTWLTAS

SEQ ID NO: 1632 - protein, 23 aa, Homo Sapiens
RTLSSSPVAGTSWSRYGTWLTAS

SEQ ID NO: 1633 - protein, 21 aa, Homo Sapiens
LSSSPVAGTSWSRYGTWLTAS

SEQ ID NO: 1634 - protein, 13 aa, Homo Sapiens
TSWSRYGTWLTAS

SEQ ID NO: 1635 - protein, 9 aa, Homo Sapiens
RYGTWLTAS

SEQ ID NO: 1636 - protein, 4 aa, Homo Sapiens
VTAS

SEQ ID NO: 1637 - skipped

SEQ ID NO: 1638 - protein, 8 aa, Homo Sapiens
TTLATQAI

SEQ ID NO: 1639 - protein, 7 aa, Homo Sapiens
TLATQAI

SEQ ID NO: 1640 - protein, 4 aa, Homo Sapiens
TQAI

SEQ ID NO: 1641 - protein, 24 aa, Homo Sapiens
SVLLEARMARPCYGISTKANTFTR

SEQ ID NO: 1642 - protein, 18 aa, Homo Sapiens
RMARPCYGISTKANTFTR

SEQ ID NO: 1643 - protein, 17 aa, Homo Sapiens
MARPCYGISTKANTFTR

SEQ ID NO: 1644 - protein, 15 aa, Homo Sapiens
RPCYGISTKANTFTR

SEQ ID NO: 1645 - protein, 13 aa, Homo Sapiens
CYGISTKANTFTR

SEQ ID NO: 1646 - protein, 23 aa, Homo Sapiens
WPGLLMARLCLLATRTTWCECGR

SEQ ID NO: 1647 - protein, 37 aa, Homo Sapiens
NLMKYSMTFGYYLIMTISSGKGQHMHLPSITWISSRL

SEQ ID NO: 1648 - skipped

SEQ ID NO: 1649 - protein, 13 aa, Homo Sapiens
WIQRTESVLNLIT

SEQ ID NO: 1650 - protein, 23 aa, Homo Sapiens
GMVVGGQNGSLQSLLQPLKWLAS

SEQ ID NO: 1651 - protein, 4 aa, Homo Sapiens
LWLM

SEQ ID NO: 1652 - protein, 12 aa, Homo Sapiens
WLVMVVLEKRPS

SEQ ID NO: 1653 - protein, 4 aa, Homo Sapiens
RFIP

SEQ ID NO: 1654 - protein, 6 aa, Homo Sapiens
RRNSVD

SEQ ID NO: 1655 - protein, 2 aa, Homo Sapiens
LM

SEQ ID NO: 1656 - protein, 14 aa, Homo Sapiens
MCCVATKWILRTGK

SEQ ID NO: 1657 - protein, 12 aa, Homo Sapiens
CVATKWILRTGK

SEQ ID NO: 1658 - protein, 32 aa, Homo Sapiens
METLTWNLLPCLLSPHQKLSWTQLWQHSMSTT

SEQ ID NO: 1659 - protein, 25 aa, Homo Sapiens
LLPCLLSPHQKLSWTQLWQHSMSTT

SEQ ID NO: 1660 - protein, 20 aa, Homo Sapiens
VSPHQKLSWTQLWQHSMSTT

SEQ ID NO: 1661 - protein, 8 aa, Homo Sapiens
WQHSMSTT

SEQ ID NO: 1662 - protein, 41 aa, Homo Sapiens
VSRMRMMTCENEAGAQRQKSSFIGSCPVMSAVQRVCHLIII

SEQ ID NO: 1663 - skipped

SEQ ID NO: 1664 - protein, 3 aa, Homo Sapiens
LHS

SEQ ID NO: 1665 - protein, 6 aa, Homo Sapiens
GEGCFP

SEQ ID NO: 1666 - protein, 19 aa, Homo Sapiens
QQEMDQWPWLGQPQWVAFS

SEQ ID NO: 1667 - protein, 16 aa, Homo Sapiens
LETIDNISRTSFLGFL

SEQ ID NO: 1668 - protein, 18 aa, Homo Sapiens
MVVVSFKQSKVFAILQWE

SEQ ID NO: 1669 - protein, 1 aa, Homo Sapiens
I

SEQ ID NO: 1670 - skipped

SEQ ID NO: 1671 - protein, 24 aa, Homo Sapiens
CSEVTQRTMLPRLELMPTGVLYEH

SEQ ID NO: 1672 - protein, 4 aa, Homo Sapiens
MYEH

SEQ ID NO: 1673 - protein, 9 aa, Homo Sapiens
WKASLFMIF

SEQ ID NO: 1674 - protein, 15 aa, Homo Sapiens
MGETCRNMRRWSTQV

SEQ ID NO: 1675 - protein, 28 aa, Homo Sapiens
WLQLLSVNSQQKISFPICWHPSQSRSKK

SEQ ID NO: 1676 - protein, 2 aa, Homo Sapiens
LM

SEQ ID NO: 1677 - protein, 18 aa, Homo Sapiens
CFIQTESSKSTKMWIRSM

SEQ ID NO: 1678 - protein, 88 aa, Homo Sapiens
VSCFPRSSGPWSRHFGHKCPSSRFSAFQSSRPTPSRSESAGSSPHPQPKTALALRTSWISSVCSVTQPRQTSSPIMPSASLTLMMTEP

SEQ ID NO: 1679 - protein, 13 aa, Homo Sapiens
LCGQPTIKTSFAG

SEQ ID NO: 1680 - protein, 5 aa, Homo Sapiens
GSQPW

SEQ ID NO: 1681 - protein, 1 aa, Homo Sapiens
L

SEQ ID NO: 1682 - protein, 10 aa, Homo Sapiens
VTLSLKMTGG

SEQ ID NO: 1683 - protein, 38 aa, Homo Sapiens
CWQQDHVTSNAECFLPTLKKWMKSQPARPGAARCLLGS

SEQ ID NO: 1684 - protein, 4 aa, Homo Sapiens
MLRL

SEQ ID NO: 1685 - protein, 1 aa, Homo Sapiens
M

SEQ ID NO: 1686 - protein, 1 aa, Homo Sapiens
W

SEQ ID NO: 1687 - protein, 12 aa, Homo Sapiens
PSWQLTRSKRLL

SEQ ID NO: 1688 - protein, 26 aa, Homo Sapiens
WPHFGTTPRLSWFLPPLLRSLELFRA

SEQ ID NO: 1689 - protein, 22 aa, Homo Sapiens
GTTPRLSWFLPPLLRSLELFRA

SEQ ID NO: 1690 - protein, 6 aa, Homo Sapiens
WWPLRC

SEQ ID NO: 1691 - protein, 29 aa, Homo Sapiens
LYRSIWVRAPAWSGMCSAWPRRMHLPSSS

SEQ ID NO: 1692 - protein, 16 aa, Homo Sapiens
GVIVQSGRSTLMWTWW

SEQ ID NO: 1693 - protein, 31 aa, Homo Sapiens
LISSQMKRFDRDSKPIPVGLPILSSMFLESS

SEQ ID NO: 1694 - protein, 35 aa, Homo Sapiens
WTMLSQNVAWTTSGTLTGSSRTMELNSAWRSSWRT

SEQ ID NO: 1695 - protein, 14 aa, Homo Sapiens
LPRCSRRERNTFQD

SEQ ID NO: 1696 - protein, 1 aa, Homo Sapiens
L

SEQ ID NO: 1697 - protein, 11 aa, Homo Sapiens
LFWYLLELSWN

SEQ ID NO: 1698 - protein, 8 aa, Homo Sapiens
MACQFQRS

SEQ ID NO: 1699 - protein, 22 aa, Homo Sapiens
WYVVLQKTFEILMKSHLYFVPP

SEQ ID NO: 1700 - protein, 35 aa, Homo Sapiens
ISMLITSEFVKFWALVSVPLQYCMAWFLRRKPKVM

SEQ ID NO: 1701 - protein, 26 aa, Homo Sapiens
VKFWALVSVPLQYCMAWFLRRKPKVM

SEQ ID NO: 1702 - protein, 17 aa, Homo Sapiens
DWPRKPSQRPQGPRSRS

SEQ ID NO: 1703 - protein, 9 aa, Homo Sapiens
VLKTVRMLM

SEQ ID NO: 1704 - protein, 38 aa, Homo Sapiens
LQICGKCSSVTAWTLAAGRSCKMEGCRWWKSRTLAKRS

SEQ ID NO: 1705 - protein, 7 aa, Homo Sapiens
MFALPPR

SEQ ID NO: 1706 - protein, 9 aa, Homo Sapiens
GRFPRRRLR

SEQ ID NO: 1707 - protein, 7 aa, Homo Sapiens
WAGLGER

SEQ ID NO: 1708 - protein, 32 aa, Homo Sapiens
PLVFSSCPWRRSGLSVISSLCTLLSCPPRQAC

SEQ ID NO: 1709 - protein, 24 aa, Homo Sapiens
WRRSGLSVISSLCTLLSCPPRQAC

SEQ ID NO: 1710 - protein, 19 aa, Homo Sapiens
LSVISSLCTLLSCPPRQAC

SEQ ID NO: 1711 - protein, 12 aa, Homo Sapiens
QLQLWESTVRQL

SEQ ID NO: 1712 - protein, 44 aa, Homo Sapiens
VGERGRKREMRLPYLLMHMMNLGVRMESGLHPNSSDKLRLWTHP

SEQ ID NO: 1713 - protein, 15 aa, Homo Sapiens
DCLLWLNFLLERITI

SEQ ID NO: 1714 - protein, 68 aa, Homo Sapiens
LRSVPRPPASLSSAAAAATPSPTLPCALASRAMPCPGSATQIRLGAPNAHWTRTSSCPTNANAWTSRP

SEQ ID NO: 1715 - protein, 26 aa, Homo Sapiens
SRTGRLSGPGVLVSSPSPTQSMLQLP

SEQ ID NO: 1716 - protein, 16 aa, Homo Sapiens
VLVSSPSPTQSMLQLP

SEQ ID NO: 1717 - protein, 15 aa, Homo Sapiens
LVSSPSPTQSMLQLP

SEQ ID NO: 1718 - protein, 86 aa, Homo Sapiens
AMGVAGIMTVDLEGMDMDMDVPETIMAETRVVMTATQEEITETIMTTEMRHAHNIDTQGIISDPGSSFQMAVFIKVFGAAPKHLIL

SEQ ID NO: 1719 - protein, 56 aa, Homo Sapiens
VVMTATQEEITETIMTTEMRHAHNIDTQGIISDPGSSFQMAVFIKVFGAAPKHLIL

SEQ ID NO: 1720 - protein, 51 aa, Homo Sapiens
TQEEITETIMTTEMRHAHNIDTQGIISDPGSSFQMAVFIKVFGAAPKHLIL

SEQ ID NO: 1721 - protein, 8 aa, Homo Sapiens
LCCLEQKY

SEQ ID NO: 1722 - protein, 14 aa, Homo Sapiens
LPQETTGRRLRRTA

SEQ ID NO: 1723 - protein, 2 aa, Homo Sapiens
MQ

SEQ ID NO: 1724 - protein, 10 aa, Homo Sapiens
LMMQLQNWIR

SEQ ID NO: 1725 - protein, 9 aa, Homo Sapiens
VLLRACAWP

SEQ ID NO: 1726 - protein, 2 aa, Homo Sapiens
SR

SEQ ID NO: 1727 - protein, 41 aa, Homo Sapiens
CVLVPVKQNYSAPVPHAMHLLSPSMHPILRVQPLSMESSKT

SEQ ID NO: 1728 - protein, 21 aa, Homo Sapiens
VSPSMHPILRVQPLSMESSKT

SEQ ID NO: 1729 - protein, 7 aa, Homo Sapiens
SMESSKT

SEQ ID NO: 1730 - protein, 37 aa, Homo Sapiens
MTLRGNIWCFSSILWISPLCVLQKLLLLVTKLTNFTT

SEQ ID NO: 1731 - protein, 30 aa, Homo Sapiens
WCFSSILWISPLCVLQKLLLLVTKLTNFTT

SEQ ID NO: 1732 - protein, 23 aa, Homo Sapiens
WISPLCVLQKLLLLVTKLTNFTT

SEQ ID NO: 1733 - protein, 19 aa, Homo Sapiens
LCVLQKLLLLVTKLTNFTT

SEQ ID NO: 1734 - protein, 13 aa, Homo Sapiens
MLLLVTKLTNFTT

SEQ ID NO: 1735 - protein, 11 aa, Homo Sapiens
LLVTKLTNFTT

SEQ ID NO: 1736 - protein, 3 aa, Homo Sapiens
WAT

SEQ ID NO: 1737 - protein, 7 aa, Homo Sapiens
PETTVCC

SEQ ID NO: 1738 - protein, 6 aa, Homo Sapiens
MESSSI

SEQ ID NO: 1739 - protein, 15 aa, Homo Sapiens
TISQWAEAWKKPSAW

SEQ ID NO: 1740 - protein, 24 aa, Homo Sapiens
QRTGHRILLRSSQVQLLPKSTFRR

SEQ ID NO: 1741 - protein, 31 aa, Homo Sapiens
CMMIRMDYERRSSMPFQDPMSLLNSIIDSSK

SEQ ID NO: 1742 - protein, 5 aa, Homo Sapiens
CCWGL

SEQ ID NO: 1743 - protein, 4 aa, Homo Sapiens
CWGL

SEQ ID NO: 1744 - protein, 11 aa, Homo Sapiens
AALCSRASTYV

SEQ ID NO: 1745 - protein, 11 aa, Homo Sapiens
LCLEAKITSTA

SEQ ID NO: 1746 - protein, 20 aa, Homo Sapiens [sequence omitted]

SEQ ID NO: 1747 - protein, 15 aa, Homo Sapiens
AITTPSWLCATPGAV

SEQ ID NO: 1748 - protein, 10 aa, Homo Sapiens
LMRPLLNLIH

SEQ ID NO: 1749 - protein, 59 aa, Homo Sapiens
GHQTVQEKNVMRQKGLKTKSIQGVILLSFKKPFYTSPFLIPLGFPIAKKPIHVYGINCL

SEQ ID NO: 1750 - protein, 14 aa, Homo Sapiens
WQETVSVDVPHLKF

SEQ ID NO: 1751 - protein, 11 aa, Homo Sapiens
LLCLWRALKPE

SEQ ID NO: 1752 - protein, 24 aa, Homo Sapiens
CILSTGSGASTLRASLTSLLWWPA

SEQ ID NO: 1753 - protein, 12 aa, Homo Sapiens
RRTLHRGARPRT

SEQ ID NO: 1754 - protein, 7 aa, Homo Sapiens
VNDRDCQ

SEQ ID NO: 1755 - protein, 2 aa, Homo Sapiens
CQ

SEQ ID NO: 1756 - protein, 3 aa, Homo Sapiens
LAR

SEQ ID NO: 1757 - protein, 29 aa, Homo Sapiens
LWCAGLGPTSVERRQRSSSPLRASRASPA

SEQ ID NO: 1758 - protein, 29 aa, Homo Sapiens
LSSLCVSWGTSSTVTRLRPWISPTWTSRR

SEQ ID NO: 1759 - protein, 5 aa, Homo Sapiens
WPQSL

SEQ ID NO: 1760 - protein, 2 aa, Homo Sapiens
QV

SEQ ID NO: 1761 - protein, 2 aa, Homo Sapiens
VT

SEQ ID NO: 1762 - protein, 47 aa, Homo Sapiens
TFTWLSTSWCHCSRKTGRMSGPYISRAPWASPSAYIKAHLNKFYYQF

SEQ ID NO: 1763 - protein, 35 aa, Homo Sapiens
SRKTGRMSGPYISRAPWASPSAYIKAHLNKFYYQF

SEQ ID NO: 1764 - protein, 25 aa, Homo Sapiens
YISRAPWASPSAYIKAHLNKFYYQF

SEQ ID NO: 1765 - protein, 19 aa, Homo Sapiens
WASPSAYIKAHLNKFYYQF

SEQ ID NO: 1766 - protein, 53 aa, Homo Sapiens
LGSLRPMSEKSLTRPAKLPPVCYSLMSWIRLPRLVEVTLEMVVGLLTESSTRS

SEQ ID NO: 1767 - protein, 1 aa, Homo Sapiens
L

SEQ ID NO: 1768 - protein, 44 aa, Homo Sapiens
WTQLNPLKLLQPSILHLFILRKNFLLQAVKILNFISMIIIVEKN

SEQ ID NO: 1769 - protein, 36 aa, Homo Sapiens
LLEVFMERVVHGGMSIFLKKMSHSLSSWSLMKIKPN

SEQ ID NO: 1770 - protein, 84 aa, Homo Sapiens
LVIVVTKMMVLSRDHQNQEAITAILPHLLFKISNDHPDEDTVNSLYPDFLLSACRKHHHSSRGTDQQDIPRSNHSGNLEFSGRK

SEQ ID NO: 1771 - protein, 14 aa, Homo Sapiens
LEVKLQHTLLLKTK

SEQ ID NO: 1772 - skipped

SEQ ID NO: 1773 - protein, 7 aa, Homo Sapiens
TAWSAQP

SEQ ID NO: 1774 - protein, 50 aa, Homo Sapiens
RVVRSCRMPTTSSRRWLTSARPPCCCSMGRRPATWPRAAGRPLRACCRRR

SEQ ID NO: 1775 - protein, 33 aa, Homo Sapiens
QCVCWCWEWRDPGKPLLYRGSQDTCMPKALHRM

SEQ ID NO: 1776 - skipped

SEQ ID NO: 1777 - protein, 4 aa, Homo Sapiens
RYPC

SEQ ID NO: 1778 - protein, 2 aa, Homo Sapiens
GS

SEQ ID NO: 1779 - protein, 3 aa, Homo Sapiens
SQS

SEQ ID NO: 1780 - protein, 37 aa, Homo Sapiens
CYLFLVGLPLTFLRTRRKRTTSNSMSAVCSSWTAVMS

SEQ ID NO: 1781 - protein, 25 aa, Homo Sapiens
LRTRRKRTTSNSMSAVCSSWTAVMS

SEQ ID NO: 1782 - protein, 28 aa, Homo Sapiens
LPFRQKLPNSCPSSSIPSIPTRRFSFGS

SEQ ID NO: 1783 - protein, 58 aa, Homo Sapiens
MLRSALSSSLSWQKTRRITRNSMRHSLKISSLESTKTPLTAAACLSCCAIIPPSLEMR

SEQ ID NO: 1784 - protein, 22 aa, Homo Sapiens
MPNSCPSSSIPSIPTRRFSFGS

SEQ ID NO: 1785 - protein, 14 aa, Homo Sapiens
LWSECGNGASRWYI

SEQ ID NO: 1786 - protein, 39 aa, Homo Sapiens
LMGRAWSQLPRRVWSCLRMRRRRRRWKRARQSLRTSASS

SEQ ID NO: 1787 - skipped

SEQ ID NO: 1788 - protein, 8 aa, Homo Sapiens
WTRFAMRA

SEQ ID NO: 1789 - protein, 4 aa, Homo Sapiens
RVKS

SEQ ID NO: 1790 - protein, 11 aa, Homo Sapiens
MTSSPTLRNVP

SEQ ID NO: 1791 - protein, 1 aa, Homo Sapiens
W

SEQ ID NO: 1792 - protein, 2 aa, Homo Sapiens
MA

SEQ ID NO: 1793 - protein, 23 aa, Homo Sapiens
WEPLPSLVLKHSWRLFRLVQTSP

SEQ ID NO: 1794 - protein, 20 aa, Homo Sapiens
MPSLVLKHSWRLFRLVQTSP

SEQ ID NO: 1795 - protein, 16 aa, Homo Sapiens
LVLAFILPTWWQRKWL

SEQ ID NO: 1796 - skipped

SEQ ID NO: 1797 - protein, 31 aa, Homo Sapiens
KMMNSMLGSLLLEVPSLCVLTMVSPLAGVPK

SEQ ID NO: 1798 - protein, 6 aa, Homo Sapiens
MAGVPK

SEQ ID NO: 1799 - skipped

SEQ ID NO: 1800 - protein, 1 aa, Homo Sapiens
K

SEQ ID NO: 1801 - protein, 44 aa, Homo Sapiens
ASVMSFPPSLTRPSTLTFKWAMSLPFSQTWGTGSQLSPRWSPPA

SEQ ID NO: 1802 - protein, 2 aa, Homo Sapiens
TR

SEQ ID NO: 1803 - protein, 7 aa, Homo Sapiens
LWSRLRL

SEQ ID NO: 1804 - protein, 58 aa, Homo Sapiens
TTSGPPAASSGGPCEVCCPTKPSEARPLWTVSRCLTASHRPTTRKSGWWFLLPSRSCV

SEQ ID NO: 1805 - protein, 45 aa, Homo Sapiens
CEVCCPTKPSEARPLWTVSRCLTASHRPTTRKSGWWFLLPSRSCV

SEQ ID NO: 1806 - protein, 36 aa, Homo Sapiens
SEARPLWTVSRCLTASHRPTTRKSGWWFLLPSRSCV

SEQ ID NO: 1807 - protein, 33 aa, Homo Sapiens
RPLWTVSRCLTASHRPTTRKSGWWFLLPSRSCV

SEQ ID NO: 1808 - protein, 31 aa, Homo Sapiens
LWTVSRCLTASHRPTTRKSGWWFLLPSRSCV

SEQ ID NO: 1809 - protein, 24 aa, Homo Sapiens
LTASHRPTTRKSGWWFLLPSRSCV

SEQ ID NO: 1810 - protein, 17 aa, Homo Sapiens
TTRKSGWWFLLPSRSCV

SEQ ID NO: 1811 - protein, 17 aa, Homo Sapiens
LPIWGAWLTRLAGSTRQ

SEQ ID NO: 1812 - protein, 15 aa, Homo Sapiens
IWGAWLTRLAGSTRQ

SEQ ID NO: 1813 - protein, 20 aa, Homo Sapiens
PWRRRGKRKPRSTTGRRNSS

SEQ ID NO: 1814 - protein, 1 aa, Homo Sapiens
S

SEQ ID NO: 1815 - protein, 21 aa, Homo Sapiens
MTNTQRSSRPTDSWSEPNKDC

SEQ ID NO: 1816 - protein, 19 aa, Homo Sapiens
NTQRSSRPTDSWSEPNKDC

SEQ ID NO: 1817 - protein, 14 aa, Homo Sapiens
SRPTDSWSEPNKDC

SEQ ID NO: 1818 - protein, 11 aa, Homo Sapiens
TDSWSEPNKDC

SEQ ID NO: 1819 - protein, 30 aa, Homo Sapiens
SWLNRYCWAGRWWSYAVKASTFLAISTETS

SEQ ID NO: 1820 - protein, 1 aa, Homo Sapiens
S

SEQ ID NO: 1821 - protein, 33 aa, Homo Sapiens
QSDRFCTSGTCWRPAISRPSGKPWMKTWTSWKV

SEQ ID NO: 1822 - protein, 28 aa, Homo Sapiens
CTSGTCWRPAISRPSGKPWMKTWTSWKV

SEQ ID NO: 1823 - protein, 9 aa, Homo Sapiens
WLKTSVSAI

SEQ ID NO: 1824 - protein, 22 aa, Homo Sapiens
SMWQKGRNRPRSWPPKQKRLNR

SEQ ID NO: 1825 - protein, 9 aa, Homo Sapiens
MRLVMTLKL

SEQ ID NO: 1826 - protein, 77 aa, Homo Sapiens
CPQFPFLLIRMSPGNIWNQKNTRSDMVLAPSGLTTAATTRVVYPHSGLGRHVFVGIKLLGIPAPSVEITSCMLTLGT

SEQ ID NO: 1827 - protein, 18 aa, Homo Sapiens
LSAPTRVSSSMLHTQESV

SEQ ID NO: 1828 - protein, 25 aa, Homo Sapiens
IMVSSFTTSPRLNHGTLTSVPLMGL

SEQ ID NO: 1829 - protein, 1 aa, Homo Sapiens
E

SEQ ID NO: 1830 - protein, 1 aa, Homo Sapiens
E

SEQ ID NO: 1831 - protein, 11 aa, Homo Sapiens
LQQLLHMDYIN

SEQ ID NO: 1832 - protein, 8 aa, Homo Sapiens
MLHMDYIN

SEQ ID NO: 1833 - protein, 6 aa, Homo Sapiens
HMDYIN

SEQ ID NO: 1834 - protein, 8 aa, Homo Sapiens
EILKCPFI

SEQ ID NO: 1835 - protein, 2 aa, Homo Sapiens
LL

SEQ ID NO: 1836 - skipped

SEQ ID NO: 1837 - protein, 45 aa, Homo Sapiens
VWAIPCIGNSGQNLSLRRRDAVLVLLEELALVRCLIIKVTYYCWK

SEQ ID NO: 1838 - protein, 32 aa, Homo Sapiens
LSLRRRDAVLVLLEELALVRCLIIKVTYYCWK

SEQ ID NO: 1839 - protein, 39 aa, Homo Sapiens
WIPKTTSKHLSRCIDGISGFLNDFTFCLEFSRHRCQLTE

SEQ ID NO: 1840 - protein, 13 aa, Homo Sapiens
ALAPILKGLRTGQ

SEQ ID NO: 1841 - protein, 51 aa, Homo Sapiens
PVPPSIWKDFSASSSRKLSFRSQRTCRRFPRHMWSAPSLSTAVHLASPSSP

SEQ ID NO: 1842 - protein, 4 aa, Homo Sapiens
ESSS

SEQ ID NO: 1843 - protein, 27 aa, Homo Sapiens
CFTFPMGKQSMPPKTTSAASCGSFLAS

SEQ ID NO: 1844 - protein, 20 aa, Homo Sapiens
WLLSLELQDLATVSLWQPLA

SEQ ID NO: 1845 - protein, 54 aa, Homo Sapiens
SGTTPLPALRASTFWIPPHGPSALNPSTLWNGMYLCFLSSWLLVELNSSCVLFK

SEQ ID NO: 1846 - protein, 4 aa, Homo Sapiens
VPSP

SEQ ID NO: 1847 - protein, 1 aa, Homo Sapiens
M

SEQ ID NO: 1848 - protein, 3 aa, Homo Sapiens
FLG

SEQ ID NO: 1849 - protein, 8 aa, Homo Sapiens
DLFLILEL

SEQ ID NO: 1850 - protein, 9 aa, Homo Sapiens
VMRLLIESS

SEQ ID NO: 1851 - protein, 30 aa, Homo Sapiens
LLLEGLLLVLEHCATMAWDCLMRLELLKRL

SEQ ID NO: 1852 - protein, 2 aa, Homo Sapiens
MV

SEQ ID NO: 1853 - protein, 57 aa, Homo Sapiens
CWKRLLGKEYVMPLQLKNPRLRQKSRTRCNRNHRRKQNFLIMKNQLLWLLPLQRAIR

SEQ ID NO: 1854 - protein, 1 aa, Homo Sapiens
L

SEQ ID NO: 1855 - protein, 1 aa, Homo Sapiens
W

SEQ ID NO: 1856 - protein, 9 aa, Homo Sapiens
STPCSRGWR

SEQ ID NO: 1857 - protein, 33 aa, Homo Sapiens
SHRRVEPQQPPQPCVPVYWCSPWPSTPCSRGWR

SEQ ID NO: 1858 - protein, 119 aa, Homo Sapiens
ALPASTVRRWNTSTHSSTRPLISSLERGGPSSSLRCRRTGPMGLPAPGSPRRQRMSSCRWMTSLTPGLTWISRMIRRPVRSSSSPSCPWPWWPLMKWRRTTIPCTAVRVRSWPAGRISG

SEQ ID NO: 1859 - protein, 50 aa, Homo Sapiens
FLPGLGRYRMPSGKMWYRKPSKPGRHPLPGSDHSESCLIFLHSRPEPAQD

SEQ ID NO: 1860 - protein, 13 aa, Homo Sapiens
LTLLSFKTVLFKA

SEQ ID NO: 1861 - protein, 4 aa, Homo Sapiens
LKMK

SEQ ID NO: 1862 - protein, 7 aa, Homo Sapiens
MWRPFGS

SEQ ID NO: 1863 - protein, 23 aa, Homo Sapiens
WTPAASCSLFLCSLPYSSFLRLI

SEQ ID NO: 1864 - protein, 21 aa, Homo Sapiens
MLCTLPLKHLLSTFCQPMKWP

SEQ ID NO: 1865 - protein, 26 aa, Homo Sapiens
MENSLGCPLKILKKRIRFLKRQEAVA

SEQ ID NO: 1866 - protein, 26 aa, Homo Sapiens
LYGSCKSLSCLMCLSPAFGVKSIRLC

SEQ ID NO: 1867 - protein, 1 aa, Homo Sapiens
L

SEQ ID NO: 1868 - protein, 64 aa, Homo Sapiens
WRKRKRNWPRKQGRRLLTIWLLGKMNELGSVWSTLSGKTTSWRPWRSWSCTVTCCWLGLALSSL

SEQ ID NO: 1869 - protein, 11 aa, Homo Sapiens
SSWVTQTSWWE

SEQ ID NO: 1870 - protein, 3 aa, Homo Sapiens
LED

SEQ ID NO: 1871 - skipped

SEQ ID NO: 1872 - protein, 5 aa, Homo Sapiens
AEAQL

SEQ ID NO: 1873 - protein, 13 aa, Homo Sapiens
EKTSCLMRMSQYH

SEQ ID NO: 1874 - protein, 47 aa, Homo Sapiens
METDAWLLSCGWIFSKYTDKARFVSVSKFKPLSNKSALKNVHPFSLW

SEQ ID NO: 1875 - protein, 31 aa, Homo Sapiens
LISSLLMPELGGSYPHSLGDISIKERKFQYL

SEQ ID NO: 1876 - protein, 19 aa, Homo Sapiens
SYPHSLGDISIKERKFQYL

SEQ ID NO: 1877 - protein, 14 aa, Homo Sapiens
MGDISIKERKFQYL

SEQ ID NO: 1878 - protein, 15 aa, Homo Sapiens
VTEPDWFPISQDFAL

SEQ ID NO: 1879 - protein, 9 aa, Homo Sapiens
FPISQDFAL

SEQ ID NO: 1880 - protein, 2 aa, Homo Sapiens
AL

SEQ ID NO: 1881 - protein, 31 aa, Homo Sapiens [sequence omitted]

SEQ ID NO: 1882 - protein, 13 aa, Homo Sapiens
LDLKIRGSSFLGT

SEQ ID NO: 1883 - protein, 12 aa, Homo Sapiens
DLKIRGSSFLGT

SEQ ID NO: 1884 - protein, 23 aa, Homo Sapiens
LIVTSMGLLHRRKAWFIKLCLMF

SEQ ID NO: 1885 - protein, 15 aa, Homo Sapiens
VHRRKAWFIKLCLMF

SEQ ID NO: 1886 - protein, 4 aa, Homo Sapiens
CLMF

SEQ ID NO: 1887 - protein, 1 aa, Homo Sapiens
L

SEQ ID NO: 1888 - protein, 18 aa, Homo Sapiens [sequence omitted]

SEQ ID NO: 1889 - protein, 3 aa, Homo Sapiens
RTP

SEQ ID NO: 1890 - protein, 30 aa, Homo Sapiens
STTSGPQTTPWTGRWLARMSFSWSRPRRKE

SEQ ID NO: 1891 - protein, 24 aa, Homo Sapiens
QTTPWTGRWLARMSFSWSRPRRKE

SEQ ID NO: 1892 - protein, 20 aa, Homo Sapiens
WTGRWLARMSFSWSRPRRKE

SEQ ID NO: 1893 - protein, 13 aa, Homo Sapiens
RMSFSWSRPRRKE

SEQ ID NO: 1894 - protein, 9 aa, Homo Sapiens
SWSRPRRKE

SEQ ID NO: 1895 - protein, 155 aa, Homo Sapiens
QHACTPSRPRRPPWRWRLPELPTIHPLKTTRPCSQRPTRWSCSGRRRRRSWSGSWPCPPRSRPPPRSPHSRSCARGCWRSRMVRGSQARARGRRLGMPRSVPRPPAWPPQRRRRSSSGGGRRLCTGCGYSRPRCGPPGSGTRSCSGCAGSRPRWP

SEQ ID NO: 1896 - protein, 142 aa, Homo Sapiens
WRWRLPELPTIHPLKTTRPCSQRPTRWSCSGRRRRRSWSGSWPCPPRSRPPPRSPHSRSCARGCWRSRMVRGSQARARGRRLGMPRSVPRPPAWPPQRRRRSSSGGGRRLCTGCGYSRPRCGPPGSGTRSCSGCAGSRPRWP

SEQ ID NO: 1897 - protein, 136 aa, Homo Sapiens
ELPTIHPLKTTRPCSQRPTRWSCSGRRRRRSWSGSWPCPPRSRPPPRSPHSRSCARGCWRSRMVRGSQARARGRRLGMPRSVPRPPAWPPQRRRRSSSGGGRRLCTGCGYSRPRCGPPGSGTRSCSGCAGSRPRWP

SEQ ID NO: 1898 - protein, 118 aa, Homo Sapiens
TRWSCSGRRRRRSWSGSWPCPPRSRPPPRSPHSRSCARGCWRSRMVRGSQARARGRRLGMPRSVPRPPAWPPQRRRRSSSGGGRRLCTGCGYSRPRCGPPGSGTRSCSGCAGSRPRWP

SEQ ID NO: 1899 - protein, 6 aa, Homo Sapiens
LRWTQR

SEQ ID NO: 1900 - protein, 21 aa, Homo Sapiens
DARRRLWPSQGTRASRLRWTG

SEQ ID NO: 1901 - protein, 8 aa, Homo Sapiens
ASRLRWTG

SEQ ID NO: 1902 - protein, 13 aa, Homo Sapiens
KDLVLLPEKANPL

SEQ ID NO: 1903 - protein, 40 aa, Homo Sapiens
WNGNGSAGDKGKSCQQHDSGYRKMRCAGLLRRGGGKRPRS

SEQ ID NO: 1904 - protein, 23 aa, Homo Sapiens
LEIIFIGGHWKMGRKKQLPVDCP

SEQ ID NO: 1905 - protein, 3 aa, Homo Sapiens
LLW

SEQ ID NO: 1906 - protein, 9 aa, Homo Sapiens
CLPCVSSPP

SEQ ID NO: 1907 - protein, 10 aa, Homo Sapiens
DFWKRSQRQR

SEQ ID NO: 1908 - protein, 19 aa, Homo Sapiens
CLVIPLNYQKKISSSTKIK

SEQ ID NO: 1909 - skipped

SEQ ID NO: 1910 - protein, 1 aa, Homo Sapiens
M

SEQ ID NO: 1911 - skipped

SEQ ID NO: 1912 - protein, 5 aa, Homo Sapiens
WFRSA

SEQ ID NO: 1913 - protein, 4 aa, Homo Sapiens
MAVS

SEQ ID NO: 1914 - protein, 11 aa, Homo Sapiens
GWDLLPVQYCG

SEQ ID NO: 1915 - protein, 29 aa, Homo Sapiens
RSQRRRLTFFVPIPKSGMFIVSSMSFIPW

SEQ ID NO: 1916 - protein, 23 aa, Homo Sapiens
MTFFVPIPKSGMFIVSSMSFIPW

SEQ ID NO: 1917 - protein, 1 aa, Homo Sapiens
G

SEQ ID NO: 1918 - protein, 12 aa, Homo Sapiens
VTSSSVRVSMRC

SEQ ID NO: 1919 - protein, 11 aa, Homo Sapiens
CGLQVVDPIFH

SEQ ID NO: 1920 - protein, 8 aa, Homo Sapiens
LMNQQNNL

SEQ ID NO: 1921 - protein, 51 aa, Homo Sapiens
QCHPEEIPLAASPASSWVSSDCPERCRSVCFLHACELHNLSLTVHLLDLFH

SEQ ID NO: 1922 - protein, 5 aa, Homo Sapiens
CFCVT

SEQ ID NO: 1923 - protein, 9 aa, Homo Sapiens
IWAACPARD

SEQ ID NO: 1924 - protein, 46 aa, Homo Sapiens
RCSSSRFVFPEVIGGCLRSTCGLLASGTQTSALKERITSLNQYIDT

SEQ ID NO: 1925 - protein, 39 aa, Homo Sapiens
VFPEVIGGCLRSTCGLLASGTQTSALKERITSLNQYIDT

SEQ ID NO: 1926 - protein, 30 aa, Homo Sapiens
LRSTCGLLASGTQTSALKERITSLNQYIDT

SEQ ID NO: 1927 - protein, 5 aa, Homo Sapiens
QYIDT

SEQ ID NO: 1928 - protein, 27 aa, Homo Sapiens
ARILLLSLACKLLASGSGAKKIRFMHV

SEQ ID NO: 1929 - protein, 2 aa, Homo Sapiens
SS

SEQ ID NO: 1930 - protein, 1 aa, Homo Sapiens
A

SEQ ID NO: 1931 - protein, 2 aa, Homo Sapiens
PS

SEQ ID NO: 1932 - protein, 67 aa, Homo Sapiens
ARCSDFANLNVIKTLKRSAILAKLGGPKHSGKQLVKSLQWIIHLNLKNVEMNLSNTSESYGIKLLMR

SEQ ID NO: 1933 - protein, 61 aa, Homo Sapiens
ANLNVIKTLKRSAILAKLGGPKHSGKQLVKSLQWIIHLNLKNVEMNLSNTSESYGIKLLMR

SEQ ID NO: 1934 - protein, 19 aa, Homo Sapiens
VEMNLSNTSESYGIKLLMR

SEQ ID NO: 1935 - protein, 4 aa, Homo Sapiens
ILMR

SEQ ID NO: 1936 - protein, 3 aa, Homo Sapiens
MMR

SEQ ID NO: 1937 - protein, 67 aa, Homo Sapiens [sequence omitted]

SEQ ID NO: 1938 - protein, 60 aa, Homo Sapiens
LLQAKGNSWKRKWYSSYKRMWTWKMLLKNLCNHFFYVHLKMPFGYLELLNYFIFYIRSLK

SEQ ID NO: 1939 - protein, 54 aa, Homo Sapiens
NSWKRKWYSSYKRMWTWKMLLKNLCNHFFYVHLKMPFGYLELLNYFIFYIRSLK

SEQ ID NO: 1940 - protein, 52 aa, Homo Sapiens
WKRKWYSSYKRMWTWKMLLKNLCNHFFYVHLKMPFGYLELLNYFIFYIRSLK

SEQ ID NO: 1941 - protein, 23 aa, Homo Sapiens
LVSCLEEPLVSKTEIFQEEVILL

SEQ ID NO: 1942 - protein, 4 aa, Homo Sapiens
ITCV

SEQ ID NO: 1943 - protein, 2 aa, Homo Sapiens
VL

SEQ ID NO: 1944 - protein, 18 aa, Homo Sapiens
DTGSASFGAAAVCFLSEP

SEQ ID NO: 1945 - protein, 25 aa, Homo Sapiens
ATRVGLPSRRMMSSCSMAPRRMWTC

SEQ ID NO: 1946 - protein, 1 aa, Homo Sapiens
A

SEQ ID NO: 1947 - protein, 4 aa, Homo Sapiens
WMLS

SEQ ID NO: 1948 - protein, 8 aa, Homo Sapiens
RLRIYKTS

SEQ ID NO: 1949 - protein, 53 aa, Homo Sapiens
VMKTVLIWMRQHLHLQFQKVFPLIQKTRMEFWWMNLDCHRSLLHRFASFKHIL

SEQ ID NO: 1950 - protein, 96 aa, Homo Sapiens
CWCPQLKPTRVLKISGANASVHLIETSVGTFTTRMYPRRTATACTWWSPCQCLAMTWRPTACCASAGTRSAAPPPSRSSLSSTCPWWVPCCSTWPS

SEQ ID NO: 1951 - protein, 25 aa, Homo Sapiens
RPPPSRSSLSSTCPWWVPCCSTWPS

SEQ ID NO: 1952 - protein, 44 aa, Homo Sapiens
RSFRPGTAATRTQGSTARPLFTSIRCTKTRPAISFTTVAAFSRV

SEQ ID NO: 1953 - protein, 12 aa, Homo Sapiens
CAYFPESLLPKL

SEQ ID NO: 1954 - protein, 84 aa, Homo Sapiens
LAKMNSREFQRTLLISVRRQLQQASLAGCMGEYQLLFMLNNNTLSRARQKFIITGLMLCNLHIVLPHEASFVMAGAGVGELQCL

SEQ ID NO: 1955 - protein, 11 aa, Homo Sapiens
AASWALSPSCC

SEQ ID NO: 1956 - protein, 26 aa, Homo Sapiens
APKNSETFSSRWLKSTGRSRISWKKC

SEQ ID NO: 1957 - protein, 37 aa, Homo Sapiens
AARILRSTRTRSCSTSTPSATSRASWRITCPTATRPH

SEQ ID NO: 1958 - protein, 3 aa, Homo Sapiens
LWR

SEQ ID NO: 1959 - protein, 65 aa, Homo Sapiens
ASHSSQAHLMVASAFLLCSGSVMLTRSLKTLPSACTAFLLLFFLFSSGDPELSCSCTLRTQSSWS

SEQ ID NO: 1960 - protein, 57 aa, Homo Sapiens
ALSISLKTRMHPSSSVVIYRRRMEKDVPMLPQSQRRKMGCPSVLNMSVGMPWHFMLK

SEQ ID NO: 1961 - protein, 3 aa, Homo Sapiens
MVI

SEQ ID NO: 1962 - protein, 1 aa, Homo Sapiens
R

SEQ ID NO: 1963 - protein, 41 aa, Homo Sapiens
LTWRIWEIKLCTAVVGGPKSSHSVMGLTQNITKRLETMWAL

SEQ ID NO: 1964 - protein, 36 aa, Homo Sapiens
WEIKLCTAVVGGPKSSHSVMGLTQNITKRLETMWAL

SEQ ID NO: 1965 - protein, 8 aa, Homo Sapiens
RKARRFLL

SEQ ID NO: 1966 - protein, 2 aa, Homo Sapiens
LL

SEQ ID NO: 1967 - protein, 34 aa, Homo Sapiens
QISMVSLGGRQVRPLDTLTQPPIRTKASSGERIH

SEQ ID NO: 1968 - protein, 28 aa, Homo Sapiens
LGGRQVRPLDTLTQPPIRTKASSGERIH

SEQ ID NO: 1969 - protein, 19 aa, Homo Sapiens
DTLTQPPIRTKASSGERIH

SEQ ID NO: 1970 - protein, 12 aa, Homo Sapiens
IRTKASSGERIH

SEQ ID NO: 1971 - protein, 4 aa, Homo Sapiens
ERIH

SEQ ID NO: 1972 - protein, 12 aa, Homo Sapiens
WRIPRSTSLEQK

SEQ ID NO: 1973 - protein, 12 aa, Homo Sapiens
LSALRRRKKGQT

SEQ ID NO: 1974 - protein, 15 aa, Homo Sapiens
GLDSEKRKSQWLLRQ

SEQ ID NO: 1975 - protein, 26 aa, Homo Sapiens
WNLTLKKFLVHLFLVIGKTSPWKIVV

SEQ ID NO: 1976 - protein, 18 aa, Homo Sapiens
LVHLFLVIGKTSPWKIVV

SEQ ID NO: 1977 - protein, 91 aa, Homo Sapiens
GTASRRRPPPLRPRPCPELPPQIGRRAQPGGRRPGRRGLTAPRAWRARTASPWTAATVASGRRKTRLTWMGCRCPTSSCSVTLRMNTCVPT

SEQ ID NO: 1978 - protein, 53 aa, Homo Sapiens
LTAPRAWRARTASPWTAATVASGRRKTRLTWMGCRCPTSSCSVTLRMNTCVPT

SEQ ID NO: 1979 - protein, 12 aa, Homo Sapiens
RRGWALDALRAC

SEQ ID NO: 1980 - protein, 39 aa, Homo Sapiens
TASRAACGGRCWTSAWSRARAATAWASWHSTPAWCPPSS

SEQ ID NO: 1981 - protein, 33 aa, Homo Sapiens
CGGRCWTSAWSRARAATAWASWHSTPAWCPPSS

SEQ ID NO: 1982 - protein, 16 aa, Homo Sapiens
CLAPPTLPSSLASASP

SEQ ID NO: 1983 - protein, 47 aa, Homo Sapiens
WWWTKLTFFFPLALKKSSRVSSVTCPGFTRLFSCQLLLTRTYKHSRS

SEQ ID NO: 1984 - protein, 2 aa, Homo Sapiens
WA

SEQ ID NO: 1985 - protein, 14 aa, Homo Sapiens
MHRNQSLIPLVVKH

SEQ ID NO: 1986 - protein, 10 aa, Homo Sapiens
QPCGLGPLPL

SEQ ID NO: 1987 - protein, 39 aa, Homo Sapiens
LYPHFLERSRLLLLFELSQWDKFEIQVFELLIIWIFFFF

SEQ ID NO: 1988 - protein, 11 aa, Homo Sapiens
LHPMQQLFFQK

SEQ ID NO: 1989 - skipped

SEQ ID NO: 1990 - protein, 7 aa, Homo Sapiens
LPIQKTV

SEQ ID NO: 1991 - protein, 16 aa, Homo Sapiens
LAKEKMPRSIFEQMTE

SEQ ID NO: 1992 - protein, 4 aa, Homo Sapiens
QIEL

SEQ ID NO: 1993 - protein, 14 aa, Homo Sapiens
LWQWSGISHPQWRL

SEQ ID NO: 1994 - protein, 41 aa, Homo Sapiens
LSLDSMALRAQPSSQKSMQPCGLTGATFSRLPSKWTATGHL

SEQ ID NO: 1995 - protein, 5 aa, Homo Sapiens
LVWTP

SEQ ID NO: 1996 - protein, 36 aa, Homo Sapiens
APMRIMSKDFGCLTRKEMAPSWVLKSGMFLSHWVRR

SEQ ID NO: 1997 - protein, 1 aa, Homo Sapiens
L

SEQ ID NO: 1998 - protein, 50 aa, Homo Sapiens
TENAASTTSAWCRRWWADAGPPCLGGGTMSLTDPASCLCMGAVTETAIIT

SEQ ID NO: 1999 - protein, 70 aa, Homo Sapiens
TQSLGLAVHPSHAGTLTWRGTPAITSSMEAAGAIRTATALRRPACSAASASRRILPCPLAQRWWFWRGCS

SEQ ID NO: 2000 - protein, 35 aa, Homo Sapiens
MNRRSKQANRNEACAANMHCTFHKHCLLILLLLAV

SEQ ID NO: 2001 - protein, 6 aa, Homo Sapiens
MLQRTL

SEQ ID NO: 2002 - protein, 51 aa, Homo Sapiens
CSRIKDISGTMVPSLRLGKTQGTMINILAVVVTMTQLMCVKLEARYVQEVK

SEQ ID NO: 2003 - protein, 29 aa, Homo Sapiens
MPSTASPWAASPLSCLQTRSQRQQKIFVL

SEQ ID NO: 2004 - protein, 22 aa, Homo Sapiens
WAASPLSCLQTRSQRQQKIFVL

SEQ ID NO: 2005 - protein, 14 aa, Homo Sapiens
LQTRSQRQQKIFVL

SEQ ID NO: 2006 - protein, 44 aa, Homo Sapiens
LVIRVPAFTELFQGLCVRVVTSHAIMALVASPSMGRNLKMRTSS

SEQ ID NO: 2007 - protein, 30 aa, Homo Sapiens
LCVRVVTSHAIMALVASPSMGRNLKMRTSS

SEQ ID NO: 2008 - protein, 14 aa, Homo Sapiens
RLSGWMASMWCLAK

SEQ ID NO: 2009 - protein, 3 aa, Homo Sapiens
LAK

SEQ ID NO: 2010 - protein, 43 aa, Homo Sapiens
MWRPWSALGPGMARPARRSPLLTVDNSNKFDLCFILTTRSFLL

SEQ ID NO: 2011 - protein, 36 aa, Homo Sapiens
LGPGMARPARRSPLLTVDNSNKFDLCFILTTRSFLL

SEQ ID NO: 2012 - protein, 1 aa, Homo Sapiens
A

SEQ ID NO: 2013-2014 - skipped (2 entries)

SEQ ID NO: 2015 - protein, 15 aa, Homo Sapiens
SIDSFFCSLDSSVSY

SEQ ID NO: 2016 - protein, 7 aa, Homo Sapiens
MDSSVSY

SEQ ID NO: 2017 - protein, 3 aa, Homo Sapiens
RAI

SEQ ID NO: 2018 - protein, 7 aa, Homo Sapiens
TWCSRTP

SEQ ID NO: 2019 - protein, 17 aa, Homo Sapiens
LPSLPLRVWAEDMLMWC

SEQ ID NO: 2020 - protein, 13 aa, Homo Sapiens
CEYSTPTSMGGGK

SEQ ID NO: 2021 - protein, 8 aa, Homo Sapiens
QATFQQSK

SEQ ID NO: 2022 - protein, 18 aa, Homo Sapiens
NGQPFKRSLVTSSSTWWH

SEQ ID NO: 2023 - protein, 13 aa, Homo Sapiens
EYWPRSWPRIRRS

SEQ ID NO: 2024 - protein, 12 aa, Homo Sapiens
SPAQVTTSGNSC

SEQ ID NO: 2025 - protein, 30 aa, Homo Sapiens
RCWYVKPPSTKKKNQRWCQVAPLSISSVRM

SEQ ID NO: 2026 - protein, 57 aa, Homo Sapiens
RAPWLQLVRGARGCWELRRWPWGEPWGCTTRRGGTCAPRTSTQSAQPRSSPCPAACS

SEQ ID NO: 2027 - protein, 3 aa, Homo Sapiens
MEG

SEQ ID NO: 2028 - protein, 7 aa, Homo Sapiens
LKQLMRA

SEQ ID NO: 2029 - protein, 11 aa, Homo Sapiens
LSNGERSRTVW

SEQ ID NO: 2030 - protein, 16 aa, Homo Sapiens
ALGLSHMPLWRRWMQL

SEQ ID NO: 2031 - protein, 15 aa, Homo Sapiens
LGLSHMPLWRRWMQL

SEQ ID NO: 2032 - protein, 18 aa, Homo Sapiens
WNQRELSPEKILKDQVPT

SEQ ID NO: 2033 - protein, 13 aa, Homo Sapiens
LLVALKKTLKNIT

SEQ ID NO: 2034 - protein, 11 aa, Homo Sapiens
VALKKTLKNIT

SEQ ID NO: 2035 - protein, 8 aa, Homo Sapiens
LNSMEKLK

SEQ ID NO: 2036 - protein, 7 aa, Homo Sapiens
RKGALPL

SEQ ID NO: 2037 - protein, 3 aa, Homo Sapiens
LPL

SEQ ID NO: 2038 - protein, 14 aa, Homo Sapiens
MTPWIRLSFRNTIL

SEQ ID NO: 2039 - protein, 9 aa, Homo Sapiens
RLSFRNTIL

SEQ ID NO: 2040 - protein, 8 aa, Homo Sapiens
MSFRNTIL

SEQ ID NO: 2041 - protein, 155 aa, Homo Sapiens
TTVKLEKPCQSKRWLVLHPAKEVEVVLETLVVVVEVVSVGMTTSVVEETSVVVVALVAAVVVVDMVAVGMAIMDLVMMVVMEEAALVTLEEAEAMEVVDRVMETRAVAMAGVAAMTAITTEAEAALAVVVEAILEVVEATMILGITTISLQILDP

SEQ ID NO: 2042 - protein, 145 aa, Homo Sapiens
SKRWLVLHPAKEVEVVLETLVVVVEVVSVGMTTSVVEETSVVVVALVAAVVVVDMVAVGMAIMDLVMMVVMEEAALVTLEEAEAMEVVDRVMETRAVAMAGVAAMTAITTEAEAALAVVVEAILEVVEATMILGITTISLQILDP

SEQ ID NO: 2043 - protein, 141 aa, Homo Sapiens
VVLHPAKEVEVVLETLVVVVEVVSVGMTTSVVEETSVVVVALVAAVVVVDMVAVGMAIMDLVMMVVMEEAALVTLEEAEAMEVVDRVMETRAVAMAGVAAMTAITTEAEAALAVVVEAILEVVEATMILGITTISLQILDP

SEQ ID NO: 2044 - protein, 135 aa, Homo Sapiens
KEVEVVLETLVVVVEVVSVGMTTSVVEETSVVVVALVAAVVVVDMVAVGMAIMDLVMMVVMEEAALVTLEEAEAMEVVDRVMETRAVAMAGVAAMTAITTEAEAALAVVVEAILEVVEATMILGITTISLQILDP

SEQ ID NO: 2045 - protein, 134 aa, Homo Sapiens
EVEVVLETLVVVVEVVSVGMTTSVVEETSVVVVALVAAVVVVDMVAVGMAIMDLVMMVVMEEAALVTLEEAEAMEVVDRVMETRAVAMAGVAAMTAITTEAEAALAVVVEAILEVVEATMILGITTISLQILDP

SEQ ID NO: 2046 - protein, 129 aa, Homo Sapiens
LETLVVVVEVVSVGMTTSVVEETSVVVVALVAAVVVVDMVAVGMAIMDLVMMVVMEEAALVTLEEAEAMEVVDRVMETRAVAMAGVAAMTAITTEAEAALAVVVEAILEVVEATMILGITTISLQILDP

SEQ ID NO: 2047 - protein, 126 aa, Homo Sapiens
LVVVVEVVSVGMTTSVVEETSVVVVALVAAVVVVDMVAVGMAIMDLVMMVVMEEAALVTLEEAEAMEVVDRVMETRAVAMAGVAAMTAITTEAEAALAVVVEAILEVVEATMILGITTISLQILDP

SEQ ID NO: 2048 - protein, 26 aa, Homo Sapiens
PGQASCGCRMGQWPLLCSCQWARRPP

SEQ ID NO: 2049 - protein, 15 aa, Homo Sapiens
LPSFSMLMREMPGLL

SEQ ID NO: 2050 - protein, 28 aa, Homo Sapiens
WLILPLQAQWKHLDVPLQKKTCVRLSLM

SEQ ID NO: 2051 - protein, 20 aa, Homo Sapiens
VQSGDLTSFSLLVSLTDRLS

SEQ ID NO: 2052 - protein, 24 aa, Homo Sapiens
WTQGWRWPGRAPCSGSSWRTSSTL

SEQ ID NO: 2053 - protein, 4 aa, Homo Sapiens
MSQI

SEQ ID NO: 2054 - protein, 17 aa, Homo Sapiens
LDSEKVDQMTEASGMTS

SEQ ID NO: 2055 - protein, 37 aa, Homo Sapiens
LPSVDPTWISENPQKRKEHRDHDSSLNLEQSRRPSIK

SEQ ID NO: 2056 - protein, 6 aa, Homo Sapiens
SSWSGR

SEQ ID NO: 2057 - protein, 1 aa, Homo Sapiens
S

SEQ ID NO: 2058 - protein, 4 aa, Homo Sapiens
MGCA

SEQ ID NO: 2059 - protein, 157 aa, Homo Sapiens; identical to SEQ ID NO: 915

SEQ ID NO: 2060 - protein, 3 aa, Homo Sapiens
LAL

SEQ ID NO: 2061 - protein, 27 aa, Homo Sapiens
STETCSTVPPLCPESPCTWPTLWVRMT

SEQ ID NO: 2062 - protein, 58 aa, Homo Sapiens
ARLVSRLAMPAGSSTAWNTASSPMARCQVTRPLGEEMIPSTPSSVKRVLASMCPGQCL

SEQ ID NO: 2063 - protein, 52 aa, Homo Sapiens
MAMPAGSSTAWNTASSPMARCQVTRPLGEEMIPSTPSSVKRVLASMCPGQCL

SEQ ID NO: 2064 - protein, 26 aa, Homo Sapiens
MGEEMIPSTPSSVKRVLASMCPGQCL

SEQ ID NO: 2065 - protein, 1 aa, Homo Sapiens
L

SEQ ID NO: 2066 - protein, 106 aa, Homo Sapiens
MMKFALALTASSSTLSNSSQARKMLPITMPEGTTPLARRSLTSCWTEFASWLTSAPVFRASWFSTALVGELVLGSPRCSWNVSQLIMARSPSWSSPFTRRPRFPQL

SEQ ID NO: 2067 - protein, 96 aa, Homo Sapiens
SSSTLSNSSQARKMLPITMPEGTTPLARRSLTSCWTEFASWLTSAPVFRASWFSTALVGELVLGSPRCSWNVSQLIMARSPSWSSPFTRRPRFPQL

SEQ ID NO: 2068 - protein, 62 aa, Homo Sapiens
WTEFASWLTSAPVFRASWFSTALVGELVLGSPRCSWNVSQLIMARSPSWSSPFTRRPRFPQL

SEQ ID NO: 2069 - protein, 40 aa, Homo Sapiens
LVGELVLGSPRCSWNVSQLIMARSPSWSSPFTRRPRFPQL

SEQ ID NO: 2070 - protein, 5 aa, Homo Sapiens
RFPQL

SEQ ID NO: 2071 - protein, 17 aa, Homo Sapiens
PSSPPTPPWSTLIVPSW

SEQ ID NO: 2072 - protein, 4 aa, Homo Sapiens
VPSW

SEQ ID NO: 2073 - protein, 33 aa, Homo Sapiens; identical to SEQ ID NO: 1602

SEQ ID NO: 2074 - protein, 48 aa, Homo Sapiens
QRVSTRSWMRMSRRLPMTPTASQKGFTTMWSPVALCVLKPLSCQPSQD

SEQ ID NO: 2075 - protein, 18 aa, Homo Sapiens
LYLDSELILVVARQLALA

SEQ ID NO: 2076 - protein, 10 aa, Homo Sapiens
LVVARQLALA

SEQ ID NO: 2077 - protein, 2 aa, Homo Sapiens
LA

SEQ ID NO: 2078 - protein, 31 aa, Homo Sapiens
RAGRPRGARRPRRRPRRLRRWQRCWWSWSGG

SEQ ID NO: 2079 - protein, 26 aa, Homo Sapiens
RGARRPRRRPRRLRRWQRCWWSWSGG

SEQ ID NO: 2080 - protein, 4 aa, Homo Sapiens
LVRS

SEQ ID NO: 2081 - protein, 50 aa, Homo Sapiens; identical to SEQ ID NO: 334

SEQ ID NO: 2082 - protein, 33 aa, Homo Sapiens; identical to SEQ ID NO: 336

SEQ ID NO: 2083 - protein, 5 aa, Homo Sapiens
APLKS

SEQ ID NO: 2084 - protein, 156 aa, Homo Sapiens [sequence omitted]

SEQ ID NO: 2085 - protein, 17 aa, Homo Sapiens
LGATSSRRTVFPMTFTS

SEQ ID NO: 2086 - protein, 1 aa, Homo Sapiens
C

SEQ ID NO: 2087 - protein, 15 aa, Homo Sapiens
LPRLLTIQRILCGNC

SEQ ID NO: 2088 - protein, 36 aa, Homo Sapiens; identical to SEQ ID NO: 1996

SEQ ID NO: 2089 - protein, 17 aa, Homo Sapiens
ACKICQKWPFIVKRHES

SEQ ID NO: 2090 - protein, 6 aa, Homo Sapiens
WMMLKK

SEQ ID NO: 2091 - protein, 4 aa, Homo Sapiens
WKSS

SEQ ID NO: 2092 - protein, 10 aa, Homo Sapiens
LMKPLLNLIH

SEQ ID NO: 2093 - protein, 19 aa, Homo Sapiens
MILAPPTLVWVFSSTEKSR

SEQ ID NO: 2094 - protein, 21 aa, Homo Sapiens
MPMIRETEPLQAMSPLRTLNG

SEQ ID NO: 2095 - protein, 5 aa, Homo Sapiens
LMPNV

SEQ ID NO: 2096 - protein, 13 aa, Homo Sapiens
MDADLMMLLSSLI

SEQ ID NO: 2097 - protein, 4 aa, Homo Sapiens
SSLI

SEQ ID NO: 2098 - protein, 5 aa, Homo Sapiens
GPLWW

SEQ ID NO: 2099 - protein, 55 aa, Homo Sapiens
MQKPTLGRLLPMLWSQCQLTLMTLSVRLPKMLELLLVSMYLELLMSQLLLLLLTA

SEQ ID NO: 2100 - protein, 21 aa, Homo Sapiens
MLVSMYLELLMSQLLLLLLTA

SEQ ID NO: 2101 - protein, 4 aa, Homo Sapiens
MLTA

SEQ ID NO: 2102 - skipped

SEQ ID NO: 2103 - protein, 62 aa, Homo Sapiens
LTWEVALLMCQSSLLRMESLRSSLQLETPTWVEKILTTEWSTILLLSLSASIRRTSVRTREL

SEQ ID NO: 2104 - protein, 55 aa, Homo Sapiens
LMCQSSLLRMESLRSSLQLETPTWVEKILTTEWSTILLLSLSASIRRTSVRTREL

SEQ ID NO: 2105 - protein, 48 aa, Homo Sapiens
MRMESLRSSLQLETPTWVEKILTTEWSTILLLSLSASIRRTSVRTREL

SEQ ID NO: 2106 - protein, 43 aa, Homo Sapiens
LRSSLQLETPTWVEKILTTEWSTILLLSLSASIRRTSVRTREL

SEQ ID NO: 2107 - protein, 34 aa, Homo Sapiens
PTWVEKILTTEWSTILLLSLSASIRRTSVRTREL

SEQ ID NO: 2108 - protein, 27 aa, Homo Sapiens
LTTEWSTILLLSLSASIRRTSVRTREL

SEQ ID NO: 2109 - protein, 19 aa, Homo Sapiens
CRVLMERYLKLMWKLPNNL

SEQ ID NO: 2110 - protein, 5 aa, Homo Sapiens
MPNNL

SEQ ID NO: 2111 - protein, 19 aa, Homo Sapiens
EMRTKKSEQMISLFGTKNS

SEQ ID NO: 2112 - protein, 2 aa, Homo Sapiens
PI

SEQ ID NO: 2113 - protein, 14 aa, Homo Sapiens
TRPSSGMPARPLTQ

SEQ ID NO: 2114 - protein, 22 aa, Homo Sapiens
WVYFGSVPELVNGRVLMLQYAV

SEQ ID NO: 2115 - protein, 18 aa, Homo Sapiens
GSVPELVNGRVLMLQYAV

SEQ ID NO: 2116 - protein, 9 aa, Homo Sapiens
RSKPRKPER

SEQ ID NO: 2117 - protein, 20 aa, Homo Sapiens
VTPATADTSPWLLSSVVGCP

SEQ ID NO: 2118 - protein, 14 aa, Homo Sapiens
DTSPWLLSSVVGCP

SEQ ID NO: 2119 - protein, 54 aa, Homo Sapiens
LARSLDQTTLYLVSLGQVTTGPKATTQRAPSWLILSWMWYGRRQRAVTACRASS

SEQ ID NO: 2120 - protein, 45 aa, Homo Sapiens
LYLVSLGQVTTGPKATTQRAPSWLILSWMWYGRRQRAVTACRASS

SEQ ID NO: 2121 - protein, 43 aa, Homo Sapiens
LVSLGQVTTGPKATTQRAPSWLILSWMWYGRRQRAVTACRASS

SEQ ID NO: 2122 - protein, 5 aa, Homo Sapiens
CRASS

SEQ ID NO: 2123 - protein, 24 aa, Homo Sapiens
AGAQALEWALSLSARSEKNTLIAS

SEQ ID NO: 2124 - protein, 22 aa, Homo Sapiens
AQALEWALSLSARSEKNTLIAS

SEQ ID NO: 2125 - protein, 4 aa, Homo Sapiens
LIAS

SEQ ID NO: 2126 - protein, 22 aa, Homo Sapiens
LHPKCLTPWSSPTMPPSPSISW

SEQ ID NO: 2127 - protein, 18 aa, Homo Sapiens
CLTPWSSPTMPPSPSISW

SEQ ID NO: 2128 - protein, 18 aa, Homo Sapiens
CLTPWSSPTMPPSPSISW

SEQ ID NO: 2129 - protein, 10 aa, Homo Sapiens
TMPPSPSISW

SEQ ID NO: 2130 - protein, 6 aa, Homo Sapiens
SPSISW

SEQ ID NO: 2131 - protein, 1 aa, Homo Sapiens
W

SEQ ID NO: 2132 - protein, 8 aa, Homo Sapiens
SMISASAL

SEQ ID NO: 2133 - protein, 5 aa, Homo Sapiens
QPTGI

SEQ ID NO: 2134 - protein, 54 aa, Homo Sapiens
SSMLTSASWQSTWSPSHVSISLCLALPLSPAVEASSIELSQCRNSPSRSSMPRT

SEQ ID NO: 2135 - protein, 46 aa, Homo Sapiens
WQSTWSPSHVSISLCLALPLSPAVEASSIELSQCRNSPSRSSMPRT

SEQ ID NO: 2136 - protein, 29 aa, Homo Sapiens
LPLSPAVEASSIELSQCRNSPSRSSMPRT

SEQ ID NO: 2137 - skipped

SEQ ID NO: 2138 - protein, 65 aa, Homo Sapiens
MGTLPPTSKPQLLCQMVSLKISACLTTKENMLCSSFTLLTSPLCAPRRSLLSVIGQKNLRNSTAK

SEQ ID NO: 2139 - protein, 33 aa, Homo Sapiens
CSSFTLLTSPLCAPRRSLLSVIGQKNLRNSTAK

SEQ ID NO: 2140 - protein, 23 aa, Homo Sapiens
LCAPRRSLLSVIGQKNLRNSTAK

SEQ ID NO: 2141 - protein, 16 aa, Homo Sapiens
MLSVIGQKNLRNSTAK

SEQ ID NO: 2142 - protein, 11 aa, Homo Sapiens
MVLLWILTSVI

SEQ ID NO: 2143 - protein, 15 aa, Homo Sapiens
WYQTRSAPLLRIMGS

SEQ ID NO: 2144 - protein, 7 aa, Homo Sapiens
MLRIMGS

SEQ ID NO: 2145 - protein, 7 aa, Homo Sapiens
AALWMRL

SEQ ID NO: 2146 - protein, 6 aa, Homo Sapiens
ALWMRL

SEQ ID NO: 2147 - protein, 40 aa, Homo Sapiens
QLAGNLAVIPSSLMSKRAKNISPSRSERWAVLVPGCGGQP

SEQ ID NO: 2148 - protein, 66 aa, Homo Sapiens; identical to SEQ ID NO: 1103

SEQ ID NO: 2149 - protein, 56 aa, Homo Sapiens
LRHSSARHLMSMKLGRSWERRERTSRLSAKSRIMRGFGGLMKSWRPVMGSWWLVVI

SEQ ID NO: 2150 - protein, 14 aa, Homo Sapiens
LLLTPSSTGPLLWL

SEQ ID NO: 2151 - protein, 28 aa, Homo Sapiens
WTLIHHPSQPGTLASSVPLAQLPDQWRR

SEQ ID NO: 2152 - protein, 26 aa, Homo Sapiens
MIHHPSQPGTLASSVPLAQLPDQWRR

SEQ ID NO: 2153 - protein, 10 aa, Homo Sapiens
MAQLPDQWRR

SEQ ID NO: 2154 - protein, 17 aa, Homo Sapiens
RKALLLTPSSTGPLLWL

SEQ ID NO: 2155 - protein, 14 aa, Homo Sapiens
LLLTPSSTGPLLWL

SEQ ID NO: 2156 - protein, 4 aa, Homo Sapiens
LLWL

SEQ ID NO: 2157 - protein, 26 aa, Homo Sapiens
APSSRRCWRHSRTSSTRPAGILAPAV

SEQ ID NO: 2158 - protein, 19 aa, Homo Sapiens
WRHSRTSSTRPAGILAPAV

SEQ ID NO: 2159 - protein, 20 aa, Homo Sapiens
MLLSLLLPPVEVLRAKQKFK

SEQ ID NO: 2160 - protein, 6 aa, Homo Sapiens
LVIHSG

SEQ ID NO: 2161 - protein, 4 aa, Homo Sapiens
WWGT

SEQ ID NO: 2162 - protein, 6 aa, Homo Sapiens
WGLKKA

SEQ ID NO: 2163 - protein, 2 aa, Homo Sapiens
WV

SEQ ID NO: 2164 - protein, 1 aa, Homo Sapiens
F

SEQ ID NO: 2165 - protein, 10 aa, Homo Sapiens
WMTLVISLPP

SEQ ID NO: 2166 - protein, 5 aa, Homo Sapiens
ISQKV

SEQ ID NO: 2167 - protein, 35 aa, Homo Sapiens
MGVSSSSMRHSTRRRMMGVPSPKLSNPRAVLWASR

SEQ ID NO: 2168 - protein, 15 aa, Homo Sapiens
SPKLSNPRAVLWASR

SEQ ID NO: 2169 - protein, 26 aa, Homo Sapiens
KGWMGCLSAVPSTRRTELTSPSGVVC

SEQ ID NO: 2170 - protein, 4 aa, Homo Sapiens
LTST

SEQ ID NO: 2171 - protein, 35 aa, Homo Sapiens
SAGLLAEESQLGFPCPRLLQDLLGQSVGLAGHPNR

SEQ ID NO: 2172 - protein, 16 aa, Homo Sapiens
VGVLPHLWAEEHPLQA

SEQ ID NO: 2173 - protein, 10 aa, Homo Sapiens
LWAEEHPLQA

SEQ ID NO: 2174 - protein, 3 aa, Homo Sapiens
LQA

SEQ ID NO: 2175 - protein, 33 aa, Homo Sapiens
SRTGSTKTTRSTGGRTCMASTCLASKMWPLRSP

SEQ ID NO: 2176 - protein, 16 aa, Homo Sapiens
TVPRTLTPRPGAAVLR

SEQ ID NO: 2177 - protein, 9 aa, Homo Sapiens
TSSSTGLPE

SEQ ID NO: 2178 - protein, 28 aa, Homo Sapiens
CWSASQSPCHLSLTGPGTRSLTLRTRPS

SEQ ID NO: 2179 - protein, 6 aa, Homo Sapiens
PRAGSS

SEQ ID NO: 2180 - protein, 67 aa, Homo Sapiens
STGATAPAPRAPTRPSSRSACAATWPPSGPSWASWLRCWCWSPSSSSTRSAGSPRTSWMMTTPALHP

SEQ ID NO: 2181 - protein, 60 aa, Homo Sapiens
APRAPTRPSSRSACAATWPPSGPSWASWLRCWCWSPSSSSTRSAGSPRTSWMMTTPALHP

SEQ ID NO: 2182 - protein, 52 aa, Homo Sapiens
SSRSACAATWPPSGPSWASWLRCWCWSPSSSSTRSAGSPRTSWMMTTPALHP

SEQ ID NO: 2183 - protein, 40 aa, Homo Sapiens
SGPSWASWLRCWCWSPSSSSTRSAGSPRTSWMMTTPALHP

SEQ ID NO: 2184 - protein, 25 aa, Homo Sapiens
LVTIERTSLKIWLLLLVVQCLEKRD

SEQ ID NO: 2185 - protein, 12 aa, Homo Sapiens
MLLVVQCLEKRD

SEQ ID NO: 2186 - protein, 5 aa, Homo Sapiens
LEKRD

SEQ ID NO: 2187 - protein, 1 aa, Homo Sapiens
L

SEQ ID NO: 2188 - protein, 8 aa, Homo Sapiens
TTPRAACG

SEQ ID NO: 2189 - protein, 5 aa, Homo Sapiens
NQRQS

SEQ ID NO: 2190 - protein, 38 aa, Homo Sapiens
LETSQIFRFLWIMKQKSTEDLLLLNLSWQRMLQQLSTT

SEQ ID NO: 2191 - protein, 16 aa, Homo Sapiens
LLNLSWQRMLQQLSTT

SEQ ID NO: 2192 - protein, 12 aa, Homo Sapiens
LDVQFVSIWPNQ

SEQ ID NO: 2193 - protein, 6 aa, Homo Sapiens
GQMMTG

SEQ ID NO: 2194 - protein, 19 aa, Homo Sapiens
WLSFHSSVFLLFMNGIRHR

SEQ ID NO: 2195 - protein, 9 aa, Homo Sapiens
VKSKQKSLD

SEQ ID NO: 2196 - protein, 69 aa, Homo Sapiens
GTFSPQDSNIMTSVSTQLSLVLMSLLLVLPVVEAVEAGDAIALLLGVVLSITGICACLGVYARKRNGQM

SEQ ID NO: 2197 - protein, 43 aa, Homo Sapiens
LVLPVVEAVEAGDAIALLLGVVLSITGICACLGVYARKRNGQM

SEQ ID NO: 2198 - protein, 38 aa, Homo Sapiens
VEAVEAGDAIALLLGVVLSITGICACLGVYARKRNGQM

SEQ ID NO: 2199 - protein, 16 aa, Homo Sapiens
ALMCLSQLEKPETAVL

SEQ ID NO: 2200 - protein, 5 aa, Homo Sapiens
VWRSS

SEQ ID NO: 2201 - protein, 60 aa, Homo Sapiens
ACCCAACRSATRSRRRWSGAVRSPSTCTSTWSCWSVSTWCLPCSWRSPTWPPMRAMPADA

SEQ ID NO: 2202 - protein, 13 aa, Homo Sapiens
WPHICESIRKVIL

SEQ ID NO: 2203 - protein, 1 aa, Homo Sapiens
M

SEQ ID NO: 2204 - skipped

SEQ ID NO: 2205 - protein, 13 aa, Homo Sapiens
MSTLSTLRAEIAS

SEQ ID NO: 2206 - protein, 2 aa, Homo Sapiens
LV

SEQ ID NO: 2207 - protein, 41 aa, Homo Sapiens
  misc_feature (1)..(1): Xaa can be any naturally occurring amino acid
XELPDSSELFHRRGGSRQQPGQFVPAGLLHLPLSGLLFRPR

SEQ ID NO: 2208 - protein, 20 aa, Homo Sapiens
  misc_feature (1)..(1): Xaa can be any naturally occurring amino acid
XFVPAGLLHLPLSGLLFRPR

SEQ ID NO: 2209 - protein, 19 aa, Homo Sapiens
  misc_feature (1)..(1): Xaa can be any naturally occurring amino acid
XVPAGLLHLPLSGLLFRPR

SEQ ID NO: 2210 - protein, 19 aa, Homo Sapiens
  misc_feature (1)..(1): Xaa can be any naturally occurring amino acid
XVPAGLLHLPLSGLLFRPR

SEQ ID NO: 2211 - protein, 40 aa, Homo Sapiens
  misc_feature (1)..(1): Xaa can be any naturally occurring amino acid
XREPLLPRIGRGEARGLRASPEDAKPAWRPRSLPGHQEAS

SEQ ID NO: 2212 - protein, 39 aa, Homo Sapiens
REPLLPRIGRGEARGLRASPEDAKPAWRPRSLPGHQEAS

SEQ ID NO: 2213 - protein, 37 aa, Homo Sapiens
  misc_feature (1)..(1): Xaa can be any naturally occurring amino acid
XLLPRIGRGEARGLRASPEDAKPAWRPRSLPGHQEAS

SEQ ID NO: 2214 - protein, 32 aa, Homo Sapiens
  misc_feature (1)..(1): Xaa can be any naturally occurring amino acid
XGRGEARGLRASPEDAKPAWRPRSLPGHQEAS

SEQ ID NO: 2215 - protein, 32 aa, Homo Sapiens; identical to SEQ ID NO: 2214
  misc_feature (1)..(1): Xaa can be any naturally occurring amino acid

SEQ ID NO: 2216 - protein, 28 aa, Homo Sapiens
  misc_feature (1)..(1): Xaa can be any naturally occurring amino acid
XARGLRASPEDAKPAWRPRSLPGHQEAS

SEQ ID NO: 2217 - protein, 4 aa, Homo Sapiens
  misc_feature (1)..(1): Xaa can be any naturally occurring amino acid
XEAS

SEQ ID NO: 2218 - skipped

SEQ ID NO: 2219 - protein, 2 aa, Homo Sapiens
  misc_feature (1)..(1): Xaa can be any naturally occurring amino acid
XG

SEQ ID NO: 2220 - protein, 24 aa, Homo Sapiens
  misc_feature (1)..(1): Xaa can be any naturally occurring amino acid
XEKAEPGPFGSSCPGFCPHGPPSL

SEQ ID NO: 2221 - protein, 22 aa, Homo Sapiens
  misc_feature (1)..(1): Xaa can be any naturally occurring amino acid
XAEPGPFGSSCPGFCPHGPPSL

SEQ ID NO: 2222 - protein, 7 aa, Homo Sapiens
  misc_feature (1)..(1): Xaa can be any naturally occurring amino acid
XGDSLPR

SEQ ID NO: 2223 - protein, 43 aa, Homo Sapiens
  misc_feature (1)..(1): Xaa can be any naturally occurring amino acid
XEEPRRGSKRPTSPDCQLWVDRGGRCPQISGPRQDHGRHPGPI

SEQ ID NO: 2224 - protein, 21 aa, Homo Sapiens
  misc_feature (1)..(1): Xaa can be any naturally occurring amino acid
XGRCPQISGPRQDHGRHPGPI

SEQ ID NO: 2225 - protein, 3 aa, Homo Sapiens
  misc_feature (1)..(1): Xaa can be any naturally occurring amino acid
XPI

SEQ ID NO: 2226 - protein, 8 aa, Homo Sapiens
  misc_feature (1)..(1): Xaa can be any naturally occurring amino acid
XRCFWEQG

SEQ ID NO: 2227 - protein, 30 aa, Homo Sapiens
  misc_feature (1)..(1): Xaa can be any naturally occurring amino acid
XCSPYCLYRLRPAEARSQDCCGCAELLQSD

SEQ ID NO: 2228 - protein, 24 aa, Homo Sapiens
  misc_feature (1)..(1): Xaa can be any naturally occurring amino acid
XWAESGPCSGRGTRSNRLHWGEAR

SEQ ID NO: 2229 - protein, 7 aa, Homo Sapiens
  misc_feature (1)..(1): Xaa can be any naturally occurring amino acid
XKGSWHH

SEQ ID NO: 2230 - protein, 6 aa, Homo Sapiens
  misc_feature (1)..(1): Xaa can be any naturally occurring amino acid
XGSWHH

SEQ ID NO: 2231 - protein, 25 aa, Homo Sapiens
  misc_feature (1)..(1): Xaa can be any naturally occurring amino acid
XIRGHHQCQTMSPIHLPYPSCQARD

SEQ ID NO: 2232 - protein, 7 aa, Homo Sapiens
  misc_feature (1)..(1): Xaa can be any naturally occurring amino acid
XSRCTQE

SEQ ID NO: 2233 - skipped

SEQ ID NO: 2234 - protein, 8 aa, Homo Sapiens
  misc_feature (1)..(1): Xaa can be any naturally occurring amino acid
XICKNMCC

SEQ ID NO: 2235 - protein, 15 aa, Homo Sapiens
  misc_feature (1)..(1): Xaa can be any naturally occurring amino acid
XYPFWRQIMHSCNSS

SEQ ID NO: 2236 - protein, 35 aa, Homo Sapiens
  misc_feature (1)..(1): Xaa can be any naturally occurring amino acid
XVRVLCKMSGRGPLCFPGGHWIVFLWGGTVLWLWT

SEQ ID NO: 2237 - protein, 7 aa, Homo Sapiens
  misc_feature (1)..(1): Xaa can be any naturally occurring amino acid
XRNCSAG

SEQ ID NO: 2238 - protein, 6 aa, Homo Sapiens
  misc_feature (1)..(1): Xaa can be any naturally occurring amino acid
XNCSAG

SEQ ID NO: 2239 - protein, 21 aa, Homo Sapiens
  misc_feature (1)..(1): Xaa can be any naturally occurring amino acid
XRSKSYLATERRCQMTLKTYL

SEQ ID NO: 2240 - protein, 63 aa, Homo Sapiens
  misc_feature (1)..(1): Xaa can be any naturally occurring amino acid
XLPGIQGWHDSHRAGSRQAGIQGEQEGGGGGCDHCRDTTHGGCGHCGLRGNPSRPPDLQDCLC

SEQ ID NO: 2241 - protein, 57 aa, Homo Sapiens
  misc_feature (1)..(1): Xaa can be any naturally occurring amino acid
XWHDSHRAGSRQAGIQGEQEGGGGGCDHCRDTTHGGCGHCGLRGNPSRPPDLQDCLC

SEQ ID NO: 2242 - protein, 39 aa, Homo Sapiens
  misc_feature (1)..(1): Xaa can be any naturally occurring amino acid
XEGGGGGCDHCRDTTHGGCGHCGLRGNPSRPPDLQDCLC

SEQ ID NO: 2243 - protein, 30 aa, Homo Sapiens
  misc_feature (1)..(1): Xaa can be any naturally occurring amino acid
XCRDTTHGGCGHCGLRGNPSRPPDLQDCLC

SEQ ID NO: 2244 - protein, 2 aa, Homo Sapiens
  misc_feature (1)..(1): Xaa can be any naturally occurring amino acid
XC

SEQ ID NO: 2245 - protein, 1 aa, Homo Sapiens
  misc_feature (1)..(1): Xaa can be any naturally occurring amino acid
X

SEQ ID NO: 2246 - protein, 4 aa, Homo Sapiens
  misc_feature (1)..(1): Xaa can be any naturally occurring amino acid
XELA

SEQ ID NO: 2247 - protein, 14 aa, Homo Sapiens
  misc_feature (1)..(1): Xaa can be any naturally occurring amino acid
XEEGLYQVLQEMAG

SEQ ID NO: 2248 - protein, 4 aa, Homo Sapiens
  misc_feature (1)..(1): Xaa can be any naturally occurring amino acid
XMAG

SEQ ID NO: 2249 - protein, 59 aa, Homo Sapiens
  misc_feature (1)..(1): Xaa can be any naturally occurring amino acid
XEAAGEGLQQHEEVLPSHPCHCPHPDAPASSAPEEGPPDGDPGERRHCGREAGLGPREA

SEQ ID NO: 2250 - protein, 58 aa, Homo Sapiens
  misc_feature (1)..(1): Xaa can be any naturally occurring amino acid
XAAGEGLQQHEEVLPSHPCHCPHPDAPASSAPEEGPPDGDPGERRHCGREAGLGPREA

SEQ ID NO: 2251 - protein, 55 aa, Homo Sapiens
  misc_feature (1)..(1): Xaa can be any naturally occurring amino acid
XEGLQQHEEVLPSHPCHCPHPDAPASSAPEEGPPDGDPGERRHCGREAGLGPREA

SEQ ID NO: 2252 - protein, 55 aa, Homo Sapiens; identical to SEQ ID NO: 2251
  misc_feature (1)..(1): Xaa can be any naturally occurring amino acid

SEQ ID NO: 2253 - protein, 51 aa, Homo Sapiens
  misc_feature (1)..(1): Xaa can be any naturally occurring amino acid
XQHEEVLPSHPCHCPHPDAPASSAPEEGPPDGDPGERRHCGREAGLGPREA

SEQ ID NO: 2254 - protein, 50 aa, Homo Sapiens
  misc_feature (1)..(1): Xaa can be any naturally occurring amino acid
XHEEVLPSHPCHCPHPDAPASSAPEEGPPDGDPGERRHCGREAGLGPREA

SEQ ID NO: 2255 - protein, 48 aa, Homo Sapiens
  misc_feature (1)..(1): Xaa can be any naturally occurring amino acid
XEVLPSHPCHCPHPDAPASSAPEEGPPDGDPGERRHCGREAGLGPREA

SEQ ID NO: 2256 - protein, 43 aa, Homo Sapiens
  misc_feature (1)..(1): Xaa can be any naturally occurring amino acid
XHPCHCPHPDAPASSAPEEGPPDGDPGERRHCGREAGLGPREA

SEQ ID NO: 2257 - protein, 43 aa, Homo Sapiens; identical to SEQ ID NO: 2256
  misc_feature (1)..(1): Xaa can be any naturally occurring amino acid

SEQ ID NO: 2258 - protein, 38 aa, Homo Sapiens
  misc_feature (1)..(1): Xaa can be any naturally occurring amino acid
XPHPDAPASSAPEEGPPDGDPGERRHCGREAGLGPREA

SEQ ID NO: 2259 - protein, 31 aa, Homo Sapiens
  misc_feature (1)..(1): Xaa can be any naturally occurring amino acid
XSSAPEEGPPDGDPGERRHCGREAGLGPREA

SEQ ID NO: 2260 - protein, 28 aa, Homo Sapiens
  misc_feature (1)..(1): Xaa can be any naturally occurring amino acid
XPEEGPPDGDPGERRHCGREAGLGPREA

SEQ ID NO: 2261 - protein, 26 aa, Homo Sapiens
  misc_feature (1)..(1): Xaa can be any naturally occurring amino acid
XEGPPDGDPGERRHCGREAGLGPREA

SEQ ID NO: 2262 - protein, 24 aa, Homo Sapiens
  misc_feature (1)..(1): Xaa can be any naturally occurring amino acid
XPPDGDPGERRHCGREAGLGPREA

SEQ ID NO: 2263 - protein, 18 aa, Homo Sapiens
  misc_feature (1)..(1): Xaa can be any naturally occurring amino acid
XGERRHCGREAGLGPREA

SEQ ID NO: 2264 - protein, 16 aa, Homo Sapiens
  misc_feature (1)..(1): Xaa can be any naturally occurring amino acid
XRRHCGREAGLGPREA

SEQ ID NO: 2265 - protein, 13 aa, Homo Sapiens
HCGREAGLGPREA

SEQ ID NO: 2266 - protein, 10 aa, Homo Sapiens
  misc_feature (1)..(1): Xaa can be any naturally occurring amino acid
XEAGLGPREA

SEQ ID NO: 2267 - protein, 9 aa, Homo Sapiens
  misc_feature (1)..(1): Xaa can be any naturally occurring amino acid
XAGLGPREA

SEQ ID NO: 2268 - protein, 6 aa, Homo Sapiens
  misc_feature (1)..(1): Xaa can be any naturally occurring amino acid
XGPREA

SEQ ID NO: 2269 - protein, 5 aa, Homo Sapiens
  misc_feature (1)..(1): Xaa can be any naturally occurring amino acid
XPREA

SEQ ID NO: 2270 - protein, 3 aa, Homo Sapiens
  misc_feature (1)..(1): Xaa can be any naturally occurring amino acid
XEA

SEQ ID NO: 2271 - protein, 2 aa, Homo Sapiens
  misc_feature (1)..(1): Xaa can be any naturally occurring amino acid
XA

SEQ ID NO: 2272 - protein, 12 aa, Homo Sapiens
  misc_feature (1)..(1): Xaa can be any naturally occurring amino acid
XAGTCEPSVWAG

SEQ ID NO: 2273 - protein, 11 aa, Homo Sapiens
  misc_feature (1)..(1): Xaa can be any naturally occurring amino acid
XGTCEPSVWAG

SEQ ID NO: 2274 - protein, 11 aa, Homo Sapiens
  misc_feature (1)..(1): Xaa can be any naturally occurring amino acid
XGTCEPSVWAG

SEQ ID NO: 2275 - protein, 10 aa, Homo Sapiens
  misc_feature (1)..(1): Xaa can be any naturally occurring amino acid
XTCEPSVWAG

SEQ ID NO: 2276 - protein, 8 aa, Homo Sapiens
CEPSVWAG

SEQ ID NO: 2277 - protein, 7 aa, Homo Sapiens
  misc_feature (1)..(1): Xaa can be any naturally occurring amino acid
XPSVWAG

SEQ ID NO: 2278 - protein, 6 aa, Homo Sapiens
  misc_feature (1)..(1): Xaa can be any naturally occurring amino acid
XSVWAG

SEQ ID NO: 2279 - protein, 5 aa, Homo Sapiens
  misc_feature (1)..(1): Xaa can be any naturally occurring amino acid
XVWAG

SEQ ID NO: 2280 - protein, 63 aa, Homo Sapiens
  misc_feature (1)..(1): Xaa can be any naturally occurring amino acid
XDRRHRGDQGQRLQRGHQSLAHQEAAPQDPPRPAQGGLYWGMASCSCSLLCGTRWAERLPSPH

SEQ ID NO: 2281 - protein, 60 aa, Homo Sapiens
  misc_feature (1)..(1): Xaa can be any naturally occurring amino acid
XHRGDQGQRLQRGHQSLAHQEAAPQDPPRPAQGGLYWGMASCSCSLLCGTRWAERLPSPH

SEQ ID NO: 2282 - protein, 59 aa, Homo Sapiens
  misc_feature (1)..(1): Xaa can be any naturally occurring amino acid
XRGDQGQRLQRGHQSLAHQEAAPQDPPRPAQGGLYWGMASCSCSLLCGTRWAERLPSPH

SEQ ID NO: 2283 - protein, 59 aa, Homo Sapiens; identical to SEQ ID NO: 2282
  misc_feature (1)..(1): Xaa can be any naturally occurring amino acid

SEQ ID NO: 2284 - protein, 53 aa, Homo Sapiens
QRLQRGHQSLAHQEAAPQDPPRPAQGGLYWGMASCSCSLLCGTRWAERLPSPH

SEQ ID NO: 2285 - protein, 53 aa, Homo Sapiens
  misc_feature (1)..(1): Xaa can be any naturally occurring amino acid
XRLQRGHQSLAHQEAAPQDPPRPAQGGLYWGMASCSCSLLCGTRWAERLPSPH

SEQ ID NO: 2286 - protein, 50 aa, Homo Sapiens
  misc_feature (1)..(1): Xaa can be any naturally occurring amino acid
XRGHQSLAHQEAAPQDPPRPAQGGLYWGMASCSCSLLCGTRWAERLPSPH

SEQ ID NO: 2287 - protein, 46 aa, Homo Sapiens
  misc_feature (1)..(1): Xaa can be any naturally occurring amino acid
XSLAHQEAAPQDPPRPAQGGLYWGMASCSCSLLCGTRWAERLPSPH

SEQ ID NO: 2288 - protein, 46 aa, Homo Sapiens; identical to SEQ ID NO: 2287
  misc_feature (1)..(1): Xaa can be any naturally occurring amino acid

SEQ ID NO: 2289 - protein, 40 aa, Homo Sapiens
  misc_feature (1)..(1): Xaa can be any naturally occurring amino acid
XAAPQDPPRPAQGGLYWGMASCSCSLLCGTRWAERLPSPH

SEQ ID NO: 2290 - protein, 31 aa, Homo Sapiens
  misc_feature (1)..(1): Xaa can be any naturally occurring amino acid
XAQGGLYWGMASCSCSLLCGTRWAERLPSPH

SEQ ID NO: 2291 - protein, 27 aa, Homo Sapiens
  misc_feature (1)..(1): Xaa can be any naturally occurring amino acid
XLYWGMASCSCSLLCGTRWAERLPSPH

SEQ ID NO: 2292 - protein, 26 aa, Homo Sapiens
  misc_feature (1)..(1): Xaa can be any naturally occurring amino acid
XYWGMASCSCSLLCGTRWAERLPSPH

SEQ ID NO: 2293 - protein, 19 aa, Homo Sapiens
CSCSLLCGTRWAERLPSPH

SEQ ID NO: 2294 - protein, 2 aa, Homo Sapiens
  misc_feature (1)..(1): Xaa can be any naturally occurring amino acid
XH

SEQ ID NO: 2295 - protein, 15 aa, Homo Sapiens
LPYQGRQADQEQCLH

SEQ ID NO: 2296 - protein, 26 aa, Homo Sapiens
  misc_feature (1)..(1): Xaa can be any naturally occurring amino acid
XSYSTRYCELCSHQLAQKQQTALCCQ

SEQ ID NO: 2297 - protein, 5 aa, Homo Sapiens
  misc_feature (1)..(1): Xaa can be any naturally occurring amino acid
XRSSY

SEQ ID NO: 2298 - protein, 3 aa, Homo Sapiens
  misc_feature (1)..(1): Xaa can be any naturally occurring amino acid
XGS

SEQ ID NO: 2299 - protein, 1 aa, Homo Sapiens
  misc_feature (1)..(1): Xaa can be any naturally occurring amino acid
X

SEQ ID NO: 2300 - protein, 2 aa, Homo Sapiens
  misc_feature (1)..(1): Xaa can be any naturally occurring amino acid
XS

SEQ ID NO: 2301 - protein, 1 aa, Homo Sapiens
  misc_feature (1)..(1): Xaa can be any naturally occurring amino acid
X

SEQ ID NO: 2302 - protein, 6 aa, Homo Sapiens
  misc_feature (1)..(1): Xaa can be any naturally occurring amino acid
XSCFAP

SEQ ID NO: 2303 - protein, 3 aa, Homo Sapiens
  misc_feature (1)..(1): Xaa can be any naturally occurring amino acid
XAP

SEQ ID NO: 2304 - protein, 31 aa, Homo Sapiens
  misc_feature (1)..(1): Xaa can be any naturally occurring amino acid
XKGLCLSANESWQRQNEKPSPYPAQGPVHHL

SEQ ID NO: 2305 - protein, 30 aa, Homo Sapiens
  misc_feature (1)..(1): Xaa can be any naturally occurring amino acid
XGLCLSANESWQRQNEKPSPYPAQGPVHHL

SEQ ID NO: 2306 - protein, 30 aa, Homo Sapiens; identical to SEQ ID NO: 2305
  misc_feature (1)..(1): Xaa can be any naturally occurring amino acid

SEQ ID NO: 2307 - protein, 26 aa, Homo Sapiens
  misc_feature (1)..(1): Xaa can be any naturally occurring amino acid
XSANESWQRQNEKPSPYPAQGPVHHL

SEQ ID NO: 2308 - protein, 24 aa, Homo Sapiens
  misc_feature (1)..(1): Xaa can be any naturally occurring amino acid
XNESWQRQNEKPSPYPAQGPVHHL

SEQ ID NO: 2309 - protein, 16 aa, Homo Sapiens
  misc_feature (1)..(1): Xaa can be any naturally occurring amino acid
XEKPSPYPAQGPVHHL

SEQ ID NO: 2310 - protein, 14 aa, Homo Sapiens
  misc_feature (1)..(1): Xaa can be any naturally occurring amino acid
XPSPYPAQGPVHHL

SEQ ID NO: 2311 - protein, 16 aa, Homo Sapiens
  misc_feature (1)..(1): Xaa can be any naturally occurring amino acid
XWYHQGLQKHPWNYSA

SEQ ID NO: 2312 - protein, 12 aa, Homo Sapiens
  misc_feature (1)..(1): Xaa can be any naturally occurring amino acid
XGLQKHPWNYSA

SEQ ID NO: 2313 - protein, 11 aa, Homo Sapiens
  misc_feature (1)..(1): Xaa can be any naturally occurring amino acid
XLQKHPWNYSA

SEQ ID NO: 2314 - protein, 10 aa, Homo Sapiens
  misc_feature (1)..(1): Xaa can be any naturally occurring amino acid
XQKHPWNYSA

SEQ ID NO: 2315 - protein, 8 aa, Homo Sapiens
  misc_feature (1)..(1): Xaa can be any naturally occurring amino acid
XHPWNYSA

SEQ ID NO: 2316 - protein, 5 aa, Homo Sapiens
WNYSA

SEQ ID NO: 2317 - protein, 4 aa, Homo Sapiens
NYSA

SEQ ID NO: 2318 - protein, 2 aa, Homo Sapiens
  misc_feature (1)..(1): Xaa can be any naturally occurring amino acid
XD

SEQ ID NO: 2319 - protein, 4 aa, Homo Sapiens
  misc_feature (1)..(1): Xaa can be any naturally occurring amino acid
XGDV

SEQ ID NO: 2320 - protein, 16 aa, Homo Sapiens
  misc_feature (1)..(1): Xaa can be any naturally occurring amino acid
XKEGEGSRNCYKTSWW

SEQ ID NO: 2321 - protein, 1 aa, Homo Sapiens
  misc_feature (1)..(1): Xaa can be any naturally occurring amino acid
X

SEQ ID NO: 2322 - skipped

SEQ ID NO: 2323 - protein, 24 aa, Homo Sapiens
  misc_feature (1)..(1): Xaa can be any naturally occurring amino acid
XGVAASSPSSNLQWNLCEAQQGFD

SEQ ID NO: 2324 - protein, 9 aa, Homo Sapiens
  misc_feature (1)..(1): Xaa can be any naturally occurring amino acid
XCEAQQGFD

SEQ ID NO: 2325 - protein, 6 aa, Homo Sapiens
  misc_feature (1)..(1): Xaa can be any naturally occurring amino acid
XSEVSK

SEQ ID NO: 2326 - protein, 11 aa, Homo Sapiens
  misc_feature (1)..(1): Xaa can be any naturally occurring amino acid
XRHHLHGGFDS

SEQ ID NO: 2327 - protein, 3 aa, Homo Sapiens
  misc_feature (1)..(1): Xaa can be any naturally occurring amino acid
XGK

SEQ ID NO: 2328 - protein, 25 aa, Homo Sapiens
NEEKDHPFCRRWRCWQQGGPDQQAY

SEQ ID NO: 2329 - protein, 25 aa, Homo Sapiens
  misc_feature (1)..(1): Xaa can be any naturally occurring amino acid
XEEKDHPFCRRWRCWQQGGPDQQAY

SEQ ID NO: 2330 - protein, 22 aa, Homo Sapiens
  misc_feature (1)..(1): Xaa can be any naturally occurring amino acid
XDHPFCRRWRCWQQGGPDQQAY

SEQ ID NO: 2331 - protein, 15 aa, Homo Sapiens
  misc_feature (1)..(1): Xaa can be any naturally occurring amino acid
XWRCWQQGGPDQQAY

SEQ ID NO: 2332 - protein, 8 aa, Homo Sapiens
  misc_feature (1)..(1): Xaa can be any naturally occurring amino acid
XGPDQQAY

SEQ ID NO: 2333 - protein, 2 aa, Homo Sapiens
  misc_feature (1)..(1): Xaa can be any naturally occurring amino acid
XY

SEQ ID NO: 2334 - protein, 21 aa, Homo Sapiens
  misc_feature (1)..(1): Xaa can be any naturally occurring amino acid
XGDCTRRGSHRAGCLLACPVS

SEQ ID NO: 2335 - protein, 41 aa, Homo Sapiens
  misc_feature (1)..(1): Xaa can be any naturally occurring amino acid
XNGGPLLHYQGKGKTGTSSPQEDLHHCRLHTGELGRQRRFG

SEQ ID NO: 2336 - protein, 40 aa, Homo Sapiens
  misc_feature (1)..(1): Xaa can be any naturally occurring amino acid
XGGPLLHYQGKGKTGTSSPQEDLHHCRLHTGELGRQRRFG

SEQ ID NO: 2337 - protein, 30 aa, Homo Sapiens
  misc_feature (1)..(1): Xaa can be any naturally occurring amino acid
XGKTGTSSPQEDLHHCRLHTGELGRQRRFG

SEQ ID NO: 2338 - protein, 30 aa, Homo Sapiens; identical to SEQ ID NO: 2337
  misc_feature (1)..(1): Xaa can be any naturally occurring amino acid

SEQ ID NO: 2339 - protein, 20 aa, Homo Sapiens
  misc_feature (1)..(1): Xaa can be any naturally occurring amino acid
XDLHHCRLHTGELGRQRRFG

SEQ ID NO: 2340 - protein, 11 aa, Homo Sapiens
  misc_feature (1)..(1): Xaa can be any naturally occurring amino acid
XAGGSYQDQLQ

SEQ ID NO: 2341 - protein, 1 aa, Homo Sapiens
S

SEQ ID NO: 2342 - protein, 7 aa, Homo Sapiens
  misc_feature (1)..(1): Xaa can be any naturally occurring amino acid
XARKGKG

SEQ ID NO: 2343 - protein, 68 aa, Homo Sapiens
  misc_feature (1)..(1): Xaa can be any naturally occurring amino acid
XRWQPPAHRQALHHPQRCPCWPQSGSHCCPPDWTSPGNQDCAGERELVLRASIKFVFMPKKKKKKKKK

SEQ ID NO: 2344 - protein, 49 aa, Homo Sapiens
CWPQSGSHCCPPDWTSPGNQDCAGERELVLRASIKFVFMPKKKKKKKKK

SEQ ID NO: 2345 - protein, 43 aa, Homo Sapiens
SHCCPPDWTSPGNQDCAGERELVLRASIKFVFMPKKKKKKKKK

SEQ ID NO: 2346 - protein, 39 aa, Homo Sapiens
  misc_feature (1)..(1): Xaa can be any naturally occurring amino acid
XPDWTSPGNQDCAGERELVLRASIKFVFMPKKKKKKKKK

SEQ ID NO: 2347 - protein, 31 aa, Homo Sapiens
NQDCAGERELVLRASIKFVFMPKKKKKKKKK

SEQ ID NO: 2348 - protein, 86 aa, Homo Sapiens
  misc_feature (1)..(1): Xaa can be any naturally occurring amino acid
XAHRALPHGSVPHEGARRPRLQPGGAQGGRHSQEGGPDHRHFCGSEEAEQVHGVPAGQRAAAEGVPLQTHPLPQEALGPQEGRQFC

SEQ ID NO: 2349 - protein, 1 aa, Homo Sapiens
  misc_feature (1)..(1): Xaa can be any naturally occurring amino acid
X

SEQ ID NO: 2350 - protein, 15 aa, Homo Sapiens
  misc_feature (1)..(1): Xaa can be any naturally occurring amino acid
XHPADRTGHARPERL

SEQ ID NO: 2351 - protein, 10 aa, Homo Sapiens
  misc_feature (1)..(1): Xaa can be any naturally occurring amino acid
XSQGSRRTGC

SEQ ID NO: 2352 - protein, 16 aa, Homo Sapiens
  misc_feature (1)..(1): Xaa can be any naturally occurring amino acid
XGLAAARGHVVQPAGP

SEQ ID NO: 2353 - protein, 6 aa, Homo Sapiens
  misc_feature (1)..(1): Xaa can be any naturally occurring amino acid
XSTQAP

SEQ ID NO: 2354 - protein, 1 aa, Homo Sapiens
F

SEQ ID NO: 2355 - protein, 8 aa, Homo Sapiens
  misc_feature (1)..(1): Xaa can be any naturally occurring amino acid
XWACLKYW

SEQ ID NO: 2356 - protein, 5 aa, Homo Sapiens
  misc_feature (1)..(1): Xaa can be any naturally occurring amino acid
XSWSA

SEQ ID NO: 2357 - protein, 3 aa, Homo Sapiens
  misc_feature (1)..(1): Xaa can be any naturally occurring amino acid
XYW

SEQ ID NO: 2358 - protein, 62 aa, Homo Sapiens
  misc_feature (1)..(1): Xaa can be any naturally occurring amino acid
XEEAVLYLCCYWSKEIHCCPVGEETYRCRCHEVHHCGVGYGLGCCPTSVPGSLLWLFHGRVF

SEQ ID NO: 2359 - protein, 50 aa, Homo Sapiens
SKEIHCCPVGEETYRCRCHEVHHCGVGYGLGCCPTSVPGSLLWLFHGRVF

SEQ ID NO: 2360 - protein, 2 aa, Homo Sapiens
  misc_feature (1)..(1): Xaa can be any naturally occurring amino acid
XC

SEQ ID NO: 2361 - protein, 12 aa, Homo Sapiens
  misc_feature (1)..(1): Xaa can be any naturally occurring amino acid
XRQGDLEVQLLP

SEQ ID NO: 2362 - protein, 9 aa, Homo Sapiens
  misc_feature (1)..(1): Xaa can be any naturally occurring amino acid
XCVHQGGPH

SEQ ID NO: 2363 - protein, 4 aa, Homo Sapiens
  misc_feature (1)..(1): Xaa can be any naturally occurring amino acid
XGPH

SEQ ID NO: 2364 - protein, 3 aa, Homo Sapiens
YHH

SEQ ID NO: 2365 - protein, 40 aa, Homo Sapiens
  misc_feature (1)..(1): Xaa can be any naturally occurring amino acid
XDWRQSGSQRSHAAEHAQHLPLLLWAGHPAGVRQWQHLQP

SEQ ID NO: 2366 - protein, 23 aa, Homo Sapiens
  misc_feature (1)..(1): Xaa can be any naturally occurring amino acid
XHLPLLLWAGHPAGVRQWQHLQP

SEQ ID NO: 2367 - protein, 17 aa, Homo Sapiens
  misc_feature (1)..(1): Xaa can be any naturally occurring amino acid
XWAGHPAGVRQWQHLQP

SEQ ID NO: 2368 - protein, 16 aa, Homo Sapiens
  misc_feature (1)..(1): Xaa can be any naturally occurring amino acid
XAGHPAGVRQWQHLQP

SEQ ID NO: 2369 - protein, 15 aa, Homo Sapiens
  misc_feature (1)..(1): Xaa can be any naturally occurring amino acid
XGHPAGVRQWQHLQP

SEQ ID NO: 2370 - protein, 14 aa, Homo Sapiens
  misc_feature (1)..(1): Xaa can be any naturally occurring amino acid
XHPAGVRQWQHLQP

SEQ ID NO: 2371 - protein, 7 aa, Homo Sapiens
  misc_feature (1)..(1): Xaa can be any naturally occurring amino acid
XWQHLQP

SEQ ID NO: 2372 - protein, 7 aa, Homo Sapiens
  misc_feature (1)..(1): Xaa can be any naturally occurring amino acid
XWQHLQP

SEQ ID NO: 2373 - protein, 6 aa, Homo Sapiens
  misc_feature (1)..(1): Xaa can be any naturally occurring amino acid
XQHLQP

SEQ ID NO: 2374 - protein, 55 aa, Homo Sapiens
RGNSAFSLPGGCPQCCQCLSADWLPNCCISTPFYHQRVQTSPGLVCGDGLHLPTC

SEQ ID NO: 2375 - protein, 53 aa, Homo Sapiens
  misc_feature (1)..(1): Xaa can be any naturally occurring amino acid
XSAFSLPGGCPQCCQCLSADWLPNCCISTPFYHQRVQTSPGLVCGDGLHLPTC

SEQ ID NO: 2376 - protein, 50 aa, Homo Sapiens
  misc_feature (1)..(1): Xaa can be any naturally occurring amino acid
XSLPGGCPQCCQCLSADWLPNCCISTPFYHQRVQTSPGLVCGDGLHLPTC

SEQ ID NO: 2377 - protein, 20 aa, Homo Sapiens
  misc_feature (1)..(1): Xaa can be any naturally occurring amino acid
XEWGQRLRGCGVWETPRTEG

SEQ ID NO: 2378 - protein, 12 aa, Homo Sapiens
  misc_feature (1)..(1): Xaa can be any naturally occurring amino acid
XGEDHAALGPNW

SEQ ID NO: 2379 - protein, 11 aa, Homo Sapiens
  misc_feature (1)..(1): Xaa can be any naturally occurring amino acid
XEDHAALGPNW

SEQ ID NO: 2380 - protein, 2 aa, Homo Sapiens
NW

SEQ ID NO: 2381 - protein, 2 aa, Homo Sapiens
  misc_feature (1)..(1): Xaa can be any naturally occurring amino acid
XW

SEQ ID NO: 2382 - protein, 5 aa, Homo Sapiens
  misc_feature (1)..(1): Xaa can be any naturally occurring amino acid
XEAPA

SEQ ID NO: 2383 - protein, 1 aa, Homo Sapiens
  misc_feature (1)..(1): Xaa can be any naturally occurring amino acid
X

SEQ ID NO: 2384 - protein, 7 aa, Homo Sapiens
  misc_feature (1)..(1): Xaa can be any naturally occurring amino acid
XHCGTQR

SEQ ID NO: 2385 - protein, 5 aa, Homo Sapiens
  misc_feature (1)..(1): Xaa can be any naturally occurring amino acid
XGTQR

SEQ ID NO: 2386 - protein, 45 aa, Homo Sapiens
  misc_feature (1)..(1): Xaa can be any naturally occurring amino acid
XHHPHLRTEGWEARAACHAPASPHSITGSPWQLYSGVWMLLSKDL

SEQ ID NO: 2387 - protein, 35 aa, Homo Sapiens
WEARAACHAPASPHSITGSPWQLYSGVWMLLSKDL

SEQ ID NO: 2388 - protein, 34 aa, Homo Sapiens
  misc_feature (1)..(1): Xaa can be any naturally occurring amino acid
XARAACHAPASPHSITGSPWQLYSGVWMLLSKDL

SEQ ID NO: 2389 - protein, 1 aa, Homo Sapiens
  misc_feature (1)..(1): Xaa can be any naturally occurring amino acid
X

SEQ ID NO: 2390 - protein, 3 aa, Homo Sapiens
  misc_feature (1)..(1): Xaa can be any naturally occurring amino acid
XGQ

SEQ ID NO: 2391 - protein, 20 aa, Homo Sapiens
  misc_feature (1)..(1): Xaa can be any naturally occurring amino acid
XYKKYWKDARHQDPRNQNCI

SEQ ID NO: 2392 - protein, 5 aa, Homo Sapiens
NQNCI

SEQ ID NO: 2393 - protein, 7 aa, Homo Sapiens
  misc_feature (1)..(1): Xaa can be any naturally occurring amino acid
XKMADND

SEQ ID NO: 2394 - protein, 35 aa, Homo Sapiens
  misc_feature (1)..(1): Xaa can be any naturally occurring amino acid
XTQQSDTEDLLCSAPTGPPNPEEDDGNHDPRGADK

SEQ ID NO: 2395 - protein, 10 aa, Homo Sapiens
  misc_feature (1)..(1): Xaa can be any naturally occurring amino acid
XNHDPRGADK

SEQ ID NO: 2396 - protein, 9 aa, Homo Sapiens
  misc_feature (1)..(1): Xaa can be any naturally occurring amino acid
XHDPRGADK

SEQ ID NO: 2397 - protein, 9 aa, Homo Sapiens
  misc_feature (1)..(1): Xaa can be any naturally occurring amino acid
XHDPRGADK

SEQ ID NO: 2398 - protein, 1 aa, Homo Sapiens
K

SEQ ID NO: 2399 - protein, 5 aa, Homo Sapiens
  misc_feature (1)..(1): Xaa can be any naturally occurring amino acid
XRSGQ

SEQ ID NO: 2400 - protein, 5 aa, Homo Sapiens
  misc_feature (1)..(1): Xaa can be any naturally occurring amino acid
XRSGQ

SEQ ID NO: 2401 - protein, 5 aa, Homo Sapiens
  misc_feature (1)..(1): Xaa can be any naturally occurring amino acid
XRSGQ

SEQ ID NO: 2402 - protein, 22 aa, Homo Sapiens
  misc_feature (1)..(1): Xaa can be any naturally occurring amino acid
XIDSRQHWKRHRKGLPIYLSSP

SEQ ID NO: 2403 - protein, 21 aa, Homo Sapiens
  misc_feature (1)..(1): Xaa can be any naturally occurring amino acid
XDSRQHWKRHRKGLPIYLSSP

SEQ ID NO: 2404 - protein, 20 aa, Homo Sapiens
  misc_feature (1)..(1): Xaa can be any naturally occurring amino acid
XSRQHWKRHRKGLPIYLSSP

SEQ ID NO: 2405 - protein, 18 aa, Homo Sapiens
RQHWKRHRKGLPIYLSSP

SEQ ID NO: 2406 - protein, 17 aa, Homo Sapiens
  misc_feature (1)..(1): Xaa can be any naturally occurring amino acid
XHWKRHRKGLPIYLSSP

SEQ ID NO: 2407 - protein, 14 aa, Homo Sapiens
  misc_feature (1)..(1): Xaa can be any naturally occurring amino acid
XRHRKGLPIYLSSP

SEQ ID NO: 2408 - protein, 14 aa, Homo Sapiens
  misc_feature (1)..(1): Xaa can be any naturally occurring amino acid
XRHRKGLPIYLSSP

SEQ ID NO: 2409 - protein, 14 aa, Homo Sapiens
  misc_feature (1)..(1): Xaa can be any naturally occurring amino acid
XRHRKGLPIYLSSP

SEQ ID NO: 2410 - protein, 13 aa, Homo Sapiens
  misc_feature (1)..(1): Xaa can be any naturally occurring amino acid
XHRKGLPIYLSSP

SEQ ID NO: 2411 - protein, 11 aa, Homo Sapiens
  misc_feature (1)..(1): Xaa can be any naturally occurring amino acid
XKGLPIYLSSP

SEQ ID NO: 2412 - protein, 8 aa, Homo Sapiens
  misc_feature (1)..(1): Xaa can be any naturally occurring amino acid
XPIYLSSP

SEQ ID NO: 2413 - protein, 6 aa, Homo Sapiens
  misc_feature (1)..(1): Xaa can be any naturally occurring amino acid
XYLSSP

SEQ ID NO: 2414 - protein, 10 aa, Homo Sapiens
  misc_feature (1)..(1): Xaa can be any naturally occurring amino acid
XSKNAEEAQV

SEQ ID NO: 2415 - protein, 10 aa, Homo Sapiens
  misc_feature (1)..(1): Xaa can be any naturally occurring amino acid
XSKNAEEAQV

SEQ ID NO: 2416 - protein, 9 aa, Homo Sapiens
  misc_feature (1)..(1): Xaa can be any naturally occurring amino acid
XKNAEEAQV

SEQ ID NO: 2417 - protein, 10 aa, Homo Sapiens
  misc_feature (1)..(1): Xaa can be any naturally occurring amino acid
XIGKAHGASW

SEQ ID NO: 2418 - protein, 9 aa, Homo Sapiens
  misc_feature (1)..(1): Xaa can be any naturally occurring amino acid
XGKAHGASW

SEQ ID NO: 2419 - protein, 6 aa, Homo Sapiens
AHGASW

SEQ ID NO: 2420 - protein, 7 aa, Homo Sapiens
  misc_feature (1)..(1): Xaa can be any naturally occurring amino acid
XAHGASW

SEQ ID NO: 2421 - protein, 4 aa, Homo Sapiens
  misc_feature (1)..(1): Xaa can be any naturally occurring amino acid
XASW

SEQ ID NO: 2422 - protein, 3 aa, Homo Sapiens
  misc_feature (1)..(1): Xaa can be any naturally occurring amino acid
XSW

SEQ ID NO: 2423 - protein, 1 aa, Homo Sapiens
Q

SEQ ID NO: 2424 - protein, 1 aa, Homo Sapiens
  misc_feature (1)..(1): Xaa can be any naturally occurring amino acid
X

SEQ ID NO: 2425 - protein, 8 aa, Homo Sapiens
SHWGRDRC

SEQ ID NO: 2426 - protein, 8 aa, Homo Sapiens
  misc_feature (1)..(1): Xaa can be any naturally occurring amino acid
XHWGRDRC

SEQ ID NO: 2427 - protein, 2 aa, Homo Sapiens
RC

SEQ ID NO: 2428 - protein, 1 aa, Homo Sapiens
  misc_feature (1)..(1): Xaa can be any naturally occurring amino acid
X

SEQ ID NO: 2429 - protein, 1 aa, Homo Sapiens
  misc_feature (1)..(1): Xaa can be any naturally occurring amino acid
X

SEQ ID NO: 2430 - protein, 22 aa, Homo Sapiens
  misc_feature (1)..(1): Xaa can be any naturally occurring amino acid
XTSPRICLKFRLQIVANKKCYL

SEQ ID NO: 2431 - protein, 16 aa, Homo Sapiens
  misc_feature (1)..(1): Xaa can be any naturally occurring amino acid
XLKFRLQIVANKKCYL

SEQ ID NO: 2432 - protein, 33 aa, Homo Sapiens
  misc_feature (1)..(1): Xaa can be any naturally occurring amino acid
XEKISSWLHCGCKSERSQLGYCKKRREGYSWTD

SEQ ID NO: 2433 - protein, 15 aa, Homo Sapiens
  misc_feature (1)..(1): Xaa can be any naturally occurring amino acid
XGYCKKRREGYSWTD

SEQ ID NO: 2434 - protein, 8 aa, Homo Sapiens
  misc_feature (1)..(1): Xaa can be any naturally occurring amino acid
XEAAYQEK

SEQ ID NO: 2435 - protein, 7 aa, Homo Sapiens
  misc_feature (1)..(1): Xaa can be any naturally occurring amino acid
XRGCRIC

SEQ ID NO: 2436 - protein, 20 aa, Homo Sapiens
  misc_feature (1)..(1): Xaa can be any naturally occurring amino acid
XAPGTNCEETQTFLSASFYF

SEQ ID NO: 2437 - protein, 8 aa, Homo Sapiens
  misc_feature (1)..(1): Xaa can be any naturally occurring amino acid
XLSASFYF

SEQ ID NO: 2438 - protein, 115 aa, Homo Sapiens
  misc_feature (1)..(1): Xaa can be any naturally occurring amino acid
XGATHALGRCADSAGAAPRAAGGAGWRELGGLGSRGALRAVRRACTGPVRASARRVRGAGARAGLRLLPDVRTERGPAVRHLHRALWLRPSLPAVARRGATAAGAAGRPRALRQR

SEQ ID NO: 2439 - protein, 21 aa, Homo Sapiens
  misc_feature (1)..(1): Xaa can be any naturally occurring amino acid
XEAPAVLQEHRSGLQDTQGGY

SEQ ID NO: 2440 - protein, 11 aa, Homo Sapiens
  misc_feature (1)..(1): Xaa can be any naturally occurring amino acid
XQIGVLNVLRT

SEQ ID NO: 2441 - protein, 1 aa, Homo Sapiens
  misc_feature (1)..(1): Xaa can be any naturally occurring amino acid
X

SEQ ID NO: 2442 - protein, 28 aa, Homo Sapiens
  misc_feature (1)..(1): Xaa can be any naturally occurring amino acid
XIQVPGHSKYHGPCQAWLPPKAQRHGHP

SEQ ID NO: 2443 - protein, 11 aa, Homo Sapiens
  misc_feature (1)..(1): Xaa can be any naturally occurring amino acid
XPPKAQRHGHP

SEQ ID NO: 2444 - protein, 37 aa, Homo Sapiens
VTEETLPEARIQVPGHSKYHGPCQAWLPPKAQRHGHP

SEQ ID NO: 2445 - protein, 37 aa, Homo Sapiens; identical to SEQ ID NO: 2444

SEQ ID NO: 2446 - protein, 28 aa, Homo Sapiens
  misc_feature (1)..(1): Xaa can be any naturally occurring amino acid
XIQVPGHSKYHGPCQAWLPPKAQRHGHP

SEQ ID NO: 2447 - protein, 11 aa, Homo Sapiens
  misc_feature (1)..(1): Xaa can be any naturally occurring amino acid
XPPKAQRHGHP

SEQ ID NO: 2448 - protein, 2 aa, Homo Sapiens
HP

SEQ ID NO: 2449 - protein, 6 aa, Homo Sapiens
  misc_feature (1)..(1): Xaa can be any naturally occurring amino acid
XGTDCS

SEQ ID NO: 2450 - protein, 75 aa, Homo Sapiens
GFRGCIGAGDRQCGSQAPEVHIPSCAGGPECLPHPQHPLRPHVARGPLLCHHCCGHGGSAQRSHLPAAALRTEEG

SEQ ID NO: 2451 - protein, 24 aa, Homo Sapiens
  misc_feature (1)..(1): Xaa can be any naturally occurring amino acid
XVDRRLHPGLAVHLPADVDQQAGV

SEQ ID NO: 2452 - protein, 12 aa, Homo Sapiens
LHRPPQMLLGGL

SEQ ID NO: 2453 - protein, 64 aa, Homo Sapiens
GRLPLHRGAPQAPGRDGGHGSEGFLCGRRGPEQERHPHPEVPHRARHRHQLGRHGENLAPHLLQ

SEQ ID NO: 2454 - protein, 10 aa, Homo Sapiens
  misc_feature (1)..(1): Xaa can be any naturally occurring amino acid
XENLAPHLLQ

SEQ ID NO: 2455 - protein, 1 aa, Homo Sapiens
  misc_feature (1)..(1): Xaa can be any naturally occurring amino acid
X

SEQ ID NO: 2456 - protein, 25 aa, Homo Sapiens
  misc_feature (1)..(1): Xaa can be any naturally occurring amino acid
XAPRAADRGPPEPQGQPREDDPDHV

SEQ ID NO: 2457 - protein, 22 aa, Homo Sapiens
  misc_feature (1)..(1): Xaa can be any naturally occurring amino acid
XAADRGPPEPQGQPREDDPDHV

SEQ ID NO: 2458 - protein, 18 aa, Homo Sapiens
  misc_feature (1)..(1): Xaa can be any naturally occurring amino acid
XGPPEPQGQPREDDPDHV

SEQ ID NO: 2459 - protein, 11 aa, Homo Sapiens
  misc_feature (1)..(1): Xaa can be any naturally occurring amino acid
XQPREDDPDHV

SEQ ID NO: 2460 - protein, 26 aa, Homo Sapiens
  misc_feature (1)..(1): Xaa can be any naturally occurring amino acid
XHVRCYPGCAIPVRLWPYHWHRDGLR

SEQ ID NO: 2461 - protein, 19 aa, Homo Sapiens
  misc_feature (1)..(1): Xaa can be any naturally occurring amino acid
XCAIPVRLWPYHWHRDGLR

SEQ ID NO: 2462 - protein, 14 aa, Homo Sapiens
  misc_feature (1)..(1): Xaa can be any naturally occurring amino acid
XRLWPYHWHRDGLR

SEQ ID NO: 2463 - protein, 7 aa, Homo Sapiens
  misc_feature (1)..(1): Xaa can be any naturally occurring amino acid
XHRDGLR

SEQ ID NO: 2464 - protein, 6 aa, Homo Sapiens
HRDGLR

SEQ ID NO: 2465 - protein, 1 aa, Homo Sapiens
  misc_feature (1)..(1): Xaa can be any naturally occurring amino acid
X

SEQ ID NO: 2466 - protein, 20 aa, Homo Sapiens
  misc_feature (1)..(1): Xaa can be any naturally occurring amino acid
XGVCPPPCHPASGPGWPGPD

SEQ ID NO: 2467 - protein, 18 aa, Homo Sapiens
  misc_feature (1)..(1): Xaa can be any naturally occurring amino acid
XCPPPCHPASGPGWPGPD

SEQ ID NO: 2468 - protein, 14 aa, Homo Sapiens
PCHPASGPGWPGPD

SEQ ID NO: 2469 - protein, 14 aa, Homo Sapiens
  misc_feature (1)..(1): Xaa can be any naturally occurring amino acid
XCHPASGPGWPGPD

SEQ ID NO: 2470 - protein, 8 aa, Homo Sapiens
GPGWPGPD

SEQ ID NO: 2471 - protein, 24 aa, Homo Sapiens
  misc_feature (1)..(1): Xaa can be any naturally occurring amino acid
XLPHEDPHRARLQLHHHGRAGNRA

SEQ ID NO: 2472 - protein, 6 aa, Homo Sapiens
  misc_feature (1)..(1): Xaa can be any naturally occurring amino acid
XAGNRA

SEQ ID NO: 2473 - protein, 4 aa, Homo Sapiens
  misc_feature (1)..(1): Xaa can be any naturally occurring amino acid
XNRA

SEQ ID NO: 2474 - protein, 3 aa, Homo Sapiens
  misc_feature (1)..(1): Xaa can be any naturally occurring amino acid
XRA

SEQ ID NO: 2475 - protein, 31 aa, Homo Sapiens
  misc_feature (1)..(1): Xaa can be any naturally occurring amino acid
XGEAVLRRPGLRARDGHGCFQLLPGEELRAA

SEQ ID NO: 2476 - protein, 30 aa, Homo Sapiens
  misc_feature (1)..(1): Xaa can be any naturally occurring amino acid
XEAVLRRPGLRARDGHGCFQLLPGEELRAA

SEQ ID NO: 2477 - protein, 29 aa, Homo Sapiens
  misc_feature (1)..(1): Xaa can be any naturally occurring amino acid
XAVLRRPGLRARDGHGCFQLLPGEELRAA

SEQ ID NO: 2478 - protein, 24 aa, Homo Sapiens
  misc_feature (1)..(1): Xaa can be any naturally occurring amino acid
XPGLRARDGHGCFQLLPGEELRAA

SEQ ID NO: 2479 - protein, 23 aa, Homo Sapiens
  misc_feature (1)..(1): Xaa can be any naturally occurring amino acid
XGLRARDGHGCFQLLPGEELRAA

SEQ ID NO: 2480 - protein, 14 aa, Homo Sapiens
  misc_feature (1)..(1): Xaa can be any naturally occurring amino acid
XCFQLLPGEELRAA

SEQ ID NO: 2481 - protein, 9 aa, Homo Sapiens
  misc_feature (1)..(1): Xaa can be any naturally occurring amino acid
XPGEELRAA

SEQ ID NO: 2482 - protein, 8 aa, Homo Sapiens
  misc_feature (1)..(1): Xaa can be any naturally occurring amino acid
XGEELRAA

SEQ ID NO: 2483 - protein, 6 aa, Homo Sapiens
  misc_feature (1)..(1): Xaa can be any naturally occurring amino acid
XELRAA

SEQ ID NO: 2484 - protein, 1 aa, Homo Sapiens
Q

SEQ ID NO: 2485 - protein, 4 aa, Homo Sapiens
  misc_feature (1)..(1): Xaa can be any naturally occurring amino acid
XPLP

SEQ ID NO: 2486 - protein, 2 aa, Homo Sapiens
  misc_feature (1)..(1): Xaa can be any naturally occurring amino acid
XV

SEQ ID NO: 2487 - protein, 135 aa, Homo Sapiens
  misc_feature (1)..(1): Xaa can be any naturally occurring amino acid
XLLPPGGGPGRRGEETCSRSSSWHCGEVEPQGGHACRAQRRPGLQLVPGHGQGPGSGEHPGVTRGGGLVARARVAGRQGDHGVAGQGSAERRAAARRGGARRPGRAAALTQQLHGAQRDLEAGQPTVRTQLSELR

SEQ ID NO: 2488 - protein, 15 aa, Homo Sapiens
  misc_feature (1)..(1): Xaa can be any naturally occurring amino acid
XECVCQGCSSWQRCW

SEQ ID NO: 2489 - protein, 9 aa, Homo Sapiens
  misc_feature (1)..(1): Xaa can be any naturally occurring amino acid
XCSSWQRCW

SEQ ID NO: 2490 - protein, 4 aa, Homo Sapiens
  misc_feature (1)..(1): Xaa can be any naturally occurring amino acid
XRCW

SEQ ID NO: 2491 - protein, 3 aa, Homo Sapiens
  misc_feature (1)..(1): Xaa can be any naturally occurring amino acid
XCW

SEQ ID NO: 2492 - protein, 1 aa, Homo Sapiens
  misc_feature (1)..(1): Xaa can be any naturally occurring amino acid
X

SEQ ID NO: 2493 - protein, 1 aa, Homo Sapiens
  misc_feature (1)..(1): Xaa can be any naturally occurring amino acid
X

SEQ ID NO: 2494 - protein, 39 aa, Homo Sapiens
  misc_feature (1)..(1): Xaa can be any naturally occurring amino acid
XGSSWLHCSGDYPEPSRPNKRRLCPCIGLPHGSHCMQVC

SEQ ID NO: 2495 - protein, 37 aa, Homo Sapiens
  misc_feature (1)..(1): Xaa can be any naturally occurring amino acid
XSWLHCSGDYPEPSRPNKRRLCPCIGLPHGSHCMQVC

SEQ ID NO: 2496 - protein, 32 aa, Homo Sapiens
  misc_feature (1)..(1): Xaa can be any naturally occurring amino acid
XSGDYPEPSRPNKRRLCPCIGLPHGSHCMQVC

SEQ ID NO: 2497 - protein, 13 aa, Homo Sapiens
  misc_feature (1)..(1): Xaa can be any naturally occurring amino acid
XFGQVHHYWPSDL

SEQ ID NO: 2498 - protein, 17 aa, Homo Sapiens
  misc_feature (1)..(1): Xaa can be any naturally occurring amino acid
XCPCIGLPHGSHCMQVC

SEQ ID NO: 2499 - protein, 14 aa, Homo Sapiens
CIGLPHGSHCMQVC

SEQ ID NO: 2500 - protein, 12 aa, Homo Sapiens
  misc_feature (1)..(1): Xaa can be any naturally occurring amino acid
XLPHGSHCMQVC

SEQ ID NO: 2501 - protein, 10 aa, Homo Sapiens
QVHHYWPSDL

SEQ ID NO: 2502 - protein, 6 aa, Homo Sapiens
  misc_feature (1)..(1): Xaa can be any naturally occurring amino acid
XCMQVC

SEQ ID NO: 2503 - protein, 3 aa, Homo Sapiens
  misc_feature (1)..(1): Xaa can be any naturally occurring amino acid
XVC

SEQ ID NO: 2504 - protein, 4 aa, Homo Sapiens
  misc_feature (1)..(1): Xaa can be any naturally occurring amino acid
XGKD

SEQ ID NO: 2505 - protein, 2 aa, Homo Sapiens
  misc_feature (1)..(1): Xaa can be any naturally occurring amino acid
XD

SEQ ID NO: 2506 - protein, 10 aa, Homo Sapiens
  misc_feature (1)..(1): Xaa can be any naturally occurring amino acid
XVHHYWPSDL

SEQ ID NO: 2507 - skipped

SEQ ID NO: 2508 - protein, 6 aa, Homo Sapiens
  misc_feature (1)..(1): Xaa can be any naturally occurring amino acid
XAGRWP

SEQ ID NO: 2509 - protein, 9 aa, Homo Sapiens
  misc_feature (1)..(1): Xaa can be any naturally occurring amino acid
XHHYWPSDL

SEQ ID NO: 2510 - protein, 5 aa, Homo Sapiens
  misc_feature (1)..(1): Xaa can be any naturally occurring amino acid
XLEVW

SEQ ID NO: 2511 - protein, 3 aa, Homo Sapiens
  misc_feature (1)..(1): Xaa can be any naturally occurring amino acid
XVW

SEQ ID NO: 2512 - protein, 6 aa, Homo Sapiens
WQAHVC

SEQ ID NO: 2513 - protein, 4 aa, Homo Sapiens
  misc_feature (1)..(1): Xaa can be any naturally occurring amino acid
XHVC

SEQ ID NO: 2514 - protein, 7 aa, Homo Sapiens
  misc_feature (1)..(1): Xaa can be any naturally occurring amino acid
XGSLCCS

SEQ ID NO: 2515 - protein, 5 aa, Homo Sapiens
SLCCS

SEQ ID NO: 2516 - protein, 28 aa, Homo Sapiens
  misc_feature (1)..(1): Xaa can be any naturally occurring amino acid
XGGCHQSSGQEGCWSWQGHQVCPESSEG

SEQ ID NO: 2517 - protein, 4 aa, Homo Sapiens
PSDL

SEQ ID NO: 2518 - protein, 12 aa, Homo Sapiens
QGHQVCPESSEG

SEQ ID NO: 2519 - protein, 43 aa, Homo Sapiens
  misc_feature (1)..(1): Xaa can be any naturally occurring amino acid
XNIIPNTCHPTLNQWWKNGLRTVCFNWPFKFSSKRLVNDNNAS

SEQ ID NO: 2520 - protein, 9 aa, Homo Sapiens
  misc_feature (1)..(1): Xaa can be any naturally occurring amino acid
XRWHRQKNH

SEQ ID NO: 2521 - protein, 5 aa, Homo Sapiens
  misc_feature (1)..(1): Xaa can be any naturally occurring amino acid
XQKNH

SEQ ID NO: 2522 - protein, 4 aa, Homo Sapiens
  misc_feature (1)..(1): Xaa can be any naturally occurring amino acid
XKNH

SEQ ID NO: 2523 - protein, 4 aa, Homo Sapiens
  misc_feature (1)..(1): Xaa can be any naturally occurring amino acid
XKNH

SEQ ID NO: 2524 - protein, 3 aa, Homo Sapiens
  misc_feature (1)..(1): Xaa can be any naturally occurring amino acid
XNH

SEQ ID NO: 2525 - protein, 2 aa, Homo Sapiens
  misc_feature (1)..(1): Xaa can be any naturally occurring amino acid
XH

SEQ ID NO: 2526 - protein, 1 aa, Homo Sapiens
  misc_feature (1)..(1): Xaa can be any naturally occurring amino acid
X

SEQ ID NO: 2527 - protein, 3 aa, Homo Sapiens
  misc_feature (1)..(1): Xaa can be any naturally occurring amino acid
XKI

SEQ ID NO: 2528 - protein, 2 aa, Homo Sapiens
  misc_feature (1)..(1): Xaa can be any naturally occurring amino acid
XI

SEQ ID NO: 2529 - protein, 2 aa, Homo Sapiens
  misc_feature (1)..(1): Xaa can be any naturally occurring amino acid
XI

SEQ ID NO: 2530 - protein, 1 aa, Homo Sapiens
  misc_feature (1)..(1): Xaa can be any naturally occurring amino acid
X

SEQ ID NO: 2531 - protein, 4 aa, Homo Sapiens
  misc_feature (1)..(1): Xaa can be any naturally occurring amino acid
XGGC

SEQ ID NO: 2532 - protein, 9 aa, Homo Sapiens
LLQVCLGLG

SEQ ID NO: 2533 - protein, 11 aa, Homo Sapiens
  misc_feature (1)..(1): Xaa can be any naturally occurring amino acid
XGLLQVCLGLG

SEQ ID NO: 2534 - protein, 11 aa, Homo Sapiens
  misc_feature (1)..(1): Xaa can be any naturally occurring amino acid
XGLLQVCLGLG

SEQ ID NO: 2535 - protein, 6 aa, Homo Sapiens
  misc_feature (1)..(1): Xaa can be any naturally occurring amino acid
XCLGLG

SEQ ID NO: 2536 - protein, 3 aa, Homo Sapiens
  misc_feature (1)..(1): Xaa can be any naturally occurring amino acid
XLG

SEQ ID NO: 2537 - protein, 2 aa, Homo Sapiens
  misc_feature (1)..(1): Xaa can be any naturally occurring amino acid
XG

SEQ ID NO: 2538 - protein, 1 aa, Homo Sapiens
  misc_feature (1)..(1): Xaa can be any naturally occurring amino acid
X

SEQ ID NO: 2539 - protein, 3 aa, Homo Sapiens
  misc_feature (1)..(1): Xaa can be any naturally occurring amino acid
XES

SEQ ID NO: 2540 - protein, 3 aa, Homo Sapiens
  misc_feature (1)..(1): Xaa can be any naturally occurring amino acid
XES

SEQ ID NO: 2541 - protein, 1 aa, Homo Sapiens
  misc_feature (1)..(1): Xaa can be any naturally occurring amino acid
X

SEQ ID NO: 2542 - protein, 1 aa, Homo Sapiens
  misc_feature (1)..(1): Xaa can be any naturally occurring amino acid
X

SEQ ID NO: 2543 - protein, 1 aa, Homo Sapiens
  misc_feature (1)..(1): Xaa can be any naturally occurring amino acid
X

SEQ ID NO: 2544 - protein, 3 aa, Homo Sapiens
  misc_feature (1)..(1): Xaa can be any naturally occurring amino acid
XEI

SEQ ID NO: 2545 - protein, 2 aa, Homo Sapiens
  misc_feature (1)..(1): Xaa can be any naturally occurring amino acid
XI

SEQ ID NO: 2546 - protein, 1 aa, Homo Sapiens
  misc_feature (1)..(1): Xaa can be any naturally occurring amino acid
X

SEQ ID NO: 2547 - protein, 8 aa, Homo Sapiens
  misc_feature (1)..(1): Xaa can be any naturally occurring amino acid
XQVLCDYH

SEQ ID NO: 2548 - protein, 7 aa, Homo Sapiens
  misc_feature (1)..(1): Xaa can be any naturally occurring amino acid
XVLCDYH

SEQ ID NO: 2549 - protein, 10 aa, Homo Sapiens
  misc_feature (1)..(1): Xaa can be any naturally occurring amino acid
XKHDYRDISG

SEQ ID NO: 2550 - protein, 9 aa, Homo Sapiens
  misc_feature (1)..(1): Xaa can be any naturally occurring amino acid
XHDYRDISG

SEQ ID NO: 2551 - protein, 8 aa, Homo Sapiens
  misc_feature (1)..(1): Xaa can be any naturally occurring amino acid
XDYRDISG

SEQ ID NO: 2552 - protein, 5 aa, Homo Sapiens
  misc_feature (1)..(1): Xaa can be any naturally occurring amino acid
XDISG

SEQ ID NO: 2553 - protein, 3 aa, Homo Sapiens
ISG

SEQ ID NO: 2554 - protein, 2 aa, Homo Sapiens
CW

SEQ ID NO: 2555 - protein, 1 aa, Homo Sapiens
  misc_feature (1)..(1): Xaa can be any naturally occurring amino acid
X

SEQ ID NO: 2556 - protein, 1 aa, Homo Sapiens
  misc_feature (1)..(1): Xaa can be any naturally occurring amino acid
X

SEQ ID NO: 2557 - protein, 29 aa, Homo Sapiens
  misc_feature (1)..(1): Xaa can be any naturally occurring amino acid
XSWYLQEWADPRACPSGLHTGCETTNCRC

SEQ ID NO: 2558 - protein, 28 aa, Homo Sapiens
  misc_feature (1)..(1): Xaa can be any naturally occurring amino acid
XWYLQEWADPRACPSGLHTGCETTNCRC

SEQ ID NO: 2559 - protein, 24 aa, Homo Sapiens
  misc_feature (1)..(1): Xaa can be any naturally occurring amino acid
XEWADPRACPSGLHTGCETTNCRC

SEQ ID NO: 2560 - protein, 24 aa, Homo Sapiens
  misc_feature (1)..(1): Xaa can be any naturally occurring amino acid
XEWADPRACPSGLHTGCETTNCRC

SEQ ID NO: 2561 - protein, 23 aa, Homo Sapiens
  misc_feature (1)..(1): Xaa can be any naturally occurring amino acid
XWADPRACPSGLHTGCETTNCRC

SEQ ID NO: 2562 - protein, 23 aa, Homo Sapiens
  misc_feature (1)..(1): Xaa can be any naturally occurring amino acid
XWADPRACPSGLHTGCETTNCRC

SEQ ID NO: 2563 - protein, 18 aa, Homo Sapiens
  misc_feature (1)..(1): Xaa can be any naturally occurring amino acid
XACPSGLHTGCETTNCRC

SEQ ID NO: 2564 - protein, 14 aa, Homo Sapiens
  misc_feature (1)..(1): Xaa can be any naturally occurring amino acid
XGLHTGCETTNCRC

SEQ ID NO: 2565 - protein, 13 aa, Homo Sapiens
  misc_feature (1)..(1): Xaa can be any naturally occurring amino acid
XLHTGCETTNCRC

SEQ ID NO: 2566 - protein, 12 aa, Homo Sapiens
LHTGCETTNCRC

SEQ ID NO: 2567 - protein, 11 aa, Homo Sapiens
  misc_feature (1)..(1): Xaa can be any naturally occurring amino acid
XTGCETTNCRC

SEQ ID NO: 2568 - protein, 10 aa, Homo Sapiens
TGCETTNCRC

SEQ ID NO: 2569 - protein, 10 aa, Homo Sapiens
  misc_feature (1)..(1): Xaa can be any naturally occurring amino acid
XGCETTNCRC

SEQ ID NO: 2570 - protein, 10 aa, Homo Sapiens
  misc_feature (1)..(1): Xaa can be any naturally occurring amino acid
XGCETTNCRC

SEQ ID NO: 2571 - protein, 9 aa, Homo Sapiens
  misc_feature (1)..(1): Xaa can be any naturally occurring amino acid
XCETTNCRC

SEQ ID NO: 2572 - protein, 8 aa, Homo Sapiens
CETTNCRC

SEQ ID NO: 2573 - protein, 7 aa, Homo Sapiens
  misc_feature (1)..(1): Xaa can be any naturally occurring amino acid
XTTNCRC

SEQ ID NO: 2574 - protein, 7 aa, Homo Sapiens
  misc_feature (1)..(1): Xaa can be any naturally occurring amino acid
XTTNCRC

SEQ ID NO: 2575 - protein, 6 aa, Homo Sapiens
  misc_feature (1)..(1): Xaa can be any naturally occurring amino acid
XTNCRC

SEQ ID NO: 2576 - protein, 6 aa, Homo Sapiens
  misc_feature (1)..(1): Xaa can be any naturally occurring amino acid
XTNCRC

SEQ ID NO: 2577 - protein, 5 aa, Homo Sapiens
  misc_feature (1)..(1): Xaa can be any naturally occurring amino acid
XNCRC

SEQ ID NO: 2578 - protein, 5 aa, Homo Sapiens
  misc_feature (1)..(1): Xaa can be any naturally occurring amino acid
XNCRC

SEQ ID NO: 2579 - protein, 4 aa, Homo Sapiens
  misc_feature (1)..(1): Xaa can be any naturally occurring amino acid
XCRC

SEQ ID NO: 2580 - protein, 4 aa, Homo Sapiens
  misc_feature (1)..(1): Xaa can be any naturally occurring amino acid
XCRC

SEQ ID NO: 2581 - protein, 2 aa, Homo Sapiens
  misc_feature (1)..(1): Xaa can be any naturally occurring amino acid
XC

SEQ ID NO: 2582 - protein, 6 aa, Homo Sapiens
  misc_feature (1)..(1): Xaa can be any naturally occurring amino acid
XQNGFH

SEQ ID NO: 2583 - protein, 6 aa, Homo Sapiens
  misc_feature (1)..(1): Xaa can be any naturally occurring amino acid
XQNGFH

SEQ ID NO: 2584 - protein, 5 aa, Homo Sapiens
  misc_feature (1)..(1): Xaa can be any naturally occurring amino acid
XNGFH

SEQ ID NO: 2585 - protein, 5 aa, Homo Sapiens
  misc_feature (1)..(1): Xaa can be any naturally occurring amino acid
XNGFH

SEQ ID NO: 2586 - protein, 5 aa, Homo Sapiens
  misc_feature (1)..(1): Xaa can be any naturally occurring amino acid
XNGFH

SEQ ID NO: 2587 - protein, 4 aa, Homo Sapiens
  misc_feature (1)..(1): Xaa can be any naturally occurring amino acid
XGFH

SEQ ID NO: 2588 - protein, 4 aa, Homo Sapiens
  misc_feature (1)..(1): Xaa can be any naturally occurring amino acid
XGFH

SEQ ID NO: 2589 - protein, 4 aa, Homo Sapiens
  misc_feature (1)..(1): Xaa can be any naturally occurring amino acid
XGFH

SEQ ID NO: 2590 - protein, 1 aa, Homo Sapiens
  misc_feature (1)..(1): Xaa can be any naturally occurring amino acid
X

SEQ ID NO: 2591 - skipped

SEQ ID NO: 2592 - protein, 9 aa, Homo Sapiens
  misc_feature (1)..(1): Xaa can be any naturally occurring amino acid
XATLQPEEI

SEQ ID NO: 2593 - protein, 9 aa, Homo Sapiens
  misc_feature (1)..(1): Xaa can be any naturally occurring amino acid
XATLQPEEI

SEQ ID NO: 2594 - protein, 8 aa, Homo Sapiens
  misc_feature (1)..(1): Xaa can be any naturally occurring amino acid
XTLQPEEI

SEQ ID NO: 2595 - protein, 5 aa, Homo Sapiens
  misc_feature (1)..(1): Xaa can be any naturally occurring amino acid
XPEEI

SEQ ID NO: 2596 - protein, 3 aa, Homo Sapiens
  misc_feature (1)..(1): Xaa can be any naturally occurring amino acid
XEI

SEQ ID NO: 2597 - protein, 2 aa, Homo Sapiens
  misc_feature (1)..(1): Xaa can be any naturally occurring amino acid
XI

SEQ ID NO: 2598 - protein, 2 aa, Homo Sapiens
  misc_feature (1)..(1): Xaa can be any naturally occurring amino acid
XI

SEQ ID NO: 2599 - protein, 4 aa, Homo Sapiens
  misc_feature (1)..(1): Xaa can be any naturally occurring amino acid
XGNC

SEQ ID NO: 2600 - protein, 3 aa, Homo Sapiens
  misc_feature (1)..(1): Xaa can be any naturally occurring amino acid
XNC

SEQ ID NO: 2601 - protein, 2 aa, Homo Sapiens
  misc_feature (1)..(1): Xaa can be any naturally occurring amino acid
XC

SEQ ID NO: 2602 - protein, 2 aa, Homo Sapiens
  misc_feature (1)..(1): Xaa can be any naturally occurring amino acid
XC

SEQ ID NO: 2603 - protein, 2 aa, Homo Sapiens
  misc_feature (1)..(1): Xaa can be any naturally occurring amino acid
XC

SEQ ID NO: 2604 - protein, 1 aa, Homo Sapiens
  misc_feature (1)..(1): Xaa can be any naturally occurring amino acid
X

SEQ ID NO: 2605 - skipped

SEQ ID NO: 2606 - protein, 7 aa, Homo Sapiens
  misc_feature (1)..(1): Xaa can be any naturally occurring amino acid
XGSQHLH

SEQ ID NO: 2607 - protein, 7 aa, Homo Sapiens
  misc_feature (1)..(1): Xaa can be any naturally occurring amino acid
XGSQHLH

SEQ ID NO: 2608 - protein, 5 aa, Homo Sapiens
  misc_feature (1)..(1): Xaa can be any naturally occurring amino acid
XQHLH

SEQ ID NO: 2609 - protein, 4 aa, Homo Sapiens
  misc_feature (1)..(1): Xaa can be any naturally occurring amino acid
XHLH

SEQ ID NO: 2610 - protein, 3 aa, Homo Sapiens
  misc_feature (1)..(1): Xaa can be any naturally occurring amino acid
XLH

SEQ ID NO: 2611 - protein, 2 aa, Homo Sapiens
LH

SEQ ID NO: 2612 - protein, 2 aa, Homo Sapiens
  misc_feature (1)..(1): Xaa can be any naturally occurring amino acid
XH

SEQ ID NO: 2613 - protein, 1 aa, Homo Sapiens
  misc_feature (1)..(1): Xaa can be any naturally occurring amino acid
X

SEQ ID NO: 2614 - protein, 20 aa, Homo Sapiens
  misc_feature (1)..(1): Xaa can be any naturally occurring amino acid
XENWLQPRHSSICANFWLEW

SEQ ID NO: 2615 - protein, 20 aa, Homo Sapiens
  misc_feature (1)..(1): Xaa can be any naturally occurring amino acid
XENWLQPRHSSICANFWLEW

SEQ ID NO: 2616 - protein, 20 aa, Homo Sapiens
  misc_feature (1)..(1): Xaa can be any naturally occurring amino acid
XENWLQPRHSSICANFWLEW

SEQ ID NO: 2617 - protein, 19 aa, Homo Sapiens
  misc_feature (1)..(1): Xaa can be any naturally occurring amino acid
XNWLQPRHSSICANFWLEW

SEQ ID NO: 2618 - protein, 18 aa, Homo Sapiens
  misc_feature (1)..(1): Xaa can be any naturally occurring amino acid
XWLQPRHSSICANFWLEW

SEQ ID NO: 2619 - protein, 18 aa, Homo Sapiens
  misc_feature (1)..(1): Xaa can be any naturally occurring amino acid
XWLQPRHSSICANFWLEW

SEQ ID NO: 2620 - protein, 15 aa, Homo Sapiens
  misc_feature (1)..(1): Xaa can be any naturally occurring amino acid
XPRHSSICANFWLEW

SEQ ID NO: 2621 - protein, 13 aa, Homo Sapiens
  misc_feature (1)..(1): Xaa can be any naturally occurring amino acid
XHSSICANFWLEW

SEQ ID NO: 2622 - protein, 12 aa, Homo Sapiens
  misc_feature (1)..(1): Xaa can be any naturally occurring amino acid
XSSICANFWLEW

SEQ ID NO: 2623 - protein, 12 aa, Homo Sapiens
  misc_feature (1)..(1): Xaa can be any naturally occurring amino acid
XSSICANFWLEW

SEQ ID NO: 2624 - protein, 11 aa, Homo Sapiens
SSICANFWLEW

SEQ ID NO: 2625 - protein, 11 aa, Homo Sapiens
  misc_feature (1)..(1): Xaa can be any naturally occurring amino acid
XSICANFWLEW

SEQ ID NO: 2626 - protein, 10 aa, Homo Sapiens
  misc_feature (1)..(1): Xaa can be any naturally occurring amino acid
XICANFWLEW

SEQ ID NO: 2627 - protein, 10 aa, Homo Sapiens
  misc_feature (1)..(1): Xaa can be any naturally occurring amino acid
XICANFWLEW

SEQ ID NO: 2628 - protein, 9 aa, Homo Sapiens
  misc_feature (1)..(1): Xaa can be any naturally occurring amino acid
XCANFWLEW

SEQ ID NO: 2629 - protein, 8 aa, Homo Sapiens
  misc_feature (1)..(1): Xaa can be any naturally occurring amino acid
XANFWLEW

SEQ ID NO: 2630 - protein, 8 aa, Homo Sapiens
  misc_feature (1)..(1): Xaa can be any naturally occurring amino acid
XANFWLEW

SEQ ID NO: 2631 - protein, 7 aa, Homo Sapiens
ANFWLEW

SEQ ID NO: 2632 - protein, 6 aa, Homo Sapiens
NFWLEW

SEQ ID NO: 2633 - protein, 6 aa, Homo Sapiens
  misc_feature (1)..(1): Xaa can be any naturally occurring amino acid
XFWLEW

SEQ ID NO: 2634 - protein, 5 aa, Homo Sapiens
  misc_feature (1)..(1): Xaa can be any naturally occurring amino acid
XWLEW

SEQ ID NO: 2635 - protein, 4 aa, Homo Sapiens
WLEW

SEQ ID NO: 2636 - protein, 4 aa, Homo Sapiens
  misc_feature (1)..(1): Xaa can be any naturally occurring amino acid
XLEW

SEQ ID NO: 2637 - protein, 3 aa, Homo Sapiens
LEW

SEQ ID NO: 2638 - protein, 3 aa, Homo Sapiens
  misc_feature (1)..(1): Xaa can be any naturally occurring amino acid
XEW

SEQ ID NO: 2639 - protein, 3 aa, Homo Sapiens
  misc_feature (1)..(1): Xaa can be any naturally occurring amino acid
XEW

SEQ ID NO: 2640 - protein, 3 aa, Homo Sapiens
  misc_feature (1)..(1): Xaa can be any naturally occurring amino acid
XEW

SEQ ID NO: 2641 - protein, 2 aa, Homo Sapiens
  misc_feature (1)..(1): Xaa can be any naturally occurring amino acid
XW

SEQ ID NO: 2642 - protein, 2 aa, Homo Sapiens
  misc_feature (1)..(1): Xaa can be any naturally occurring amino acid
XW

SEQ ID NO: 2643 - protein, 2 aa, Homo Sapiens
  misc_feature (1)..(1): Xaa can be any naturally occurring amino acid
XW

SEQ ID NO: 2644 - protein, 1 aa, Homo Sapiens
  misc_feature (1)..(1): Xaa can be any naturally occurring amino acid
X

SEQ ID NO: 2645 - skipped

SEQ ID NO: 2646 - protein, 8 aa, Homo Sapiens
  misc_feature (1)..(1): Xaa can be any naturally occurring amino acid
XQHAGAKC

SEQ ID NO: 2647 - protein, 7 aa, Homo Sapiens
  misc_feature (1)..(1): Xaa can be any naturally occurring amino acid
XHAGAKC

SEQ ID NO: 2648 - protein, 7 aa, Homo Sapiens
  misc_feature (1)..(1): Xaa can be any naturally occurring amino acid
XHAGAKC

SEQ ID NO: 2649 - protein, 6 aa, Homo Sapiens
  misc_feature (1)..(1): Xaa can be any naturally occurring amino acid
XAGAKC

SEQ ID NO: 2650 - protein, 6 aa, Homo Sapiens
  misc_feature (1)..(1): Xaa can be any naturally occurring amino acid
XAGAKC

SEQ ID NO: 2651 - protein, 6 aa, Homo Sapiens
  misc_feature (1)..(1): Xaa can be any naturally occurring amino acid
XAGAKC

SEQ ID NO: 2652 - protein, 5 aa, Homo Sapiens
  misc_feature (1)..(1): Xaa can be any naturally occurring amino acid
XGAKC

SEQ ID NO: 2653 - protein, 5 aa, Homo Sapiens
  misc_feature (1)..(1): Xaa can be any naturally occurring amino acid
XGAKC

SEQ ID NO: 2654 - protein, 4 aa, Homo Sapiens
GAKC

SEQ ID NO: 2655 - protein, 4 aa, Homo Sapiens
  misc_feature (1)..(1): Xaa can be any naturally occurring amino acid
XAKC

SEQ ID NO: 2656 - protein, 3 aa, Homo Sapiens
  misc_feature (1)..(1): Xaa can be any naturally occurring amino acid
XKC

SEQ ID NO: 2657 - protein, 2 aa, Homo Sapiens
KC

SEQ ID NO: 2658 - protein, 2 aa, Homo Sapiens
  misc_feature (1)..(1): Xaa can be any naturally occurring amino acid
XC

SEQ ID NO: 2659 - protein, 2 aa, Homo Sapiens
  misc_feature (1)..(1): Xaa can be any naturally occurring amino acid
XC

SEQ ID NO: 2660 - skipped

SEQ ID NO: 2661 - protein, 12 aa, Homo Sapiens
  misc_feature (1)..(1): Xaa can be any naturally occurring amino acid
XHALVQGMESHP

SEQ ID NO: 2662 - protein, 12 aa, Homo Sapiens
  misc_feature (1)..(1): Xaa can be any naturally occurring amino acid
XHALVQGMESHP

SEQ ID NO: 2663 - protein, 11 aa, Homo Sapiens
  misc_feature (1)..(1): Xaa can be any naturally occurring amino acid
XALVQGMESHP

SEQ ID NO: 2664 - protein, 11 aa, Homo Sapiens
  misc_feature (1)..(1): Xaa can be any naturally occurring amino acid
XALVQGMESHP

SEQ ID NO: 2665 - protein, 11 aa, Homo Sapiens
  misc_feature (1)..(1): Xaa can be any naturally occurring amino acid
XALVQGMESHP

SEQ ID NO: 2666 - protein, 10 aa, Homo Sapiens
  misc_feature (1)..(1): Xaa can be any naturally occurring amino acid
XLVQGMESHP

SEQ ID NO: 2667 - protein, 9 aa, Homo Sapiens
LVQGMESHP

SEQ ID NO: 2668 - protein, 9 aa, Homo Sapiens
  misc_feature (1)..(1): Xaa can be any naturally occurring amino acid
XVQGMESHP

SEQ ID NO: 2669 - protein, 8 aa, Homo Sapiens
  misc_feature (1)..(1): Xaa can be any naturally occurring amino acid
XQGMESHP

SEQ ID NO: 2670 - protein, 8 aa, Homo Sapiens
  misc_feature (1)..(1): Xaa can be any naturally occurring amino acid
XQGMESHP

SEQ ID NO: 2671 - protein, 7 aa, Homo Sapiens
  misc_feature (1)..(1): Xaa can be any naturally occurring amino acid
XGMESHP

SEQ ID NO: 2672 - protein, 7 aa, Homo Sapiens
  misc_feature (1)..(1): Xaa can be any naturally occurring amino acid
XGMESHP

SEQ ID NO: 2673 - protein, 6 aa, Homo Sapiens
  misc_feature (1)..(1): Xaa can be any naturally occurring amino acid
XMESHP

SEQ ID NO: 2674 - protein, 5 aa, Homo Sapiens
MESHP

SEQ ID NO: 2675 - protein, 5 aa, Homo Sapiens
  misc_feature (1)..(1): Xaa can be any naturally occurring amino acid
XESHP

SEQ ID NO: 2676 - protein, 4 aa, Homo Sapiens
  misc_feature (1)..(1): Xaa can be any naturally occurring amino acid
XSHP

SEQ ID NO: 2677 - protein, 4 aa, Homo Sapiens
  misc_feature (1)..(1): Xaa can be any naturally occurring amino acid
XSHP

SEQ ID NO: 2678 - protein, 4 aa, Homo Sapiens
  misc_feature (1)..(1): Xaa can be any naturally occurring amino acid
XSHP

SEQ ID NO: 2679 - protein, 3 aa, Homo Sapiens
  misc_feature (1)..(1): Xaa can be any naturally occurring amino acid
XHP

SEQ ID NO: 2680 - protein, 27 aa, Homo Sapiens
  misc_feature (1)..(1): Xaa can be any naturally occurring amino acid
XGKDSYQHCRHWTRRFGQVHHYWPSDL

SEQ ID NO: 2681 - protein, 2 aa, Homo Sapiens
  misc_feature (1)..(1): Xaa can be any naturally occurring amino acid
XP

SEQ ID NO: 2682 - protein, 2 aa, Homo Sapiens
  misc_feature (1)..(1): Xaa can be any naturally occurring amino acid
XP

SEQ ID NO: 2683 - protein, 1 aa, Homo Sapiens
  misc_feature (1)..(1): Xaa can be any naturally occurring amino acid
X

SEQ ID NO: 2684 - protein, 11 aa, Homo Sapiens
  misc_feature (1)..(1): Xaa can be any naturally occurring amino acid
XGWQCQWNHAA

SEQ ID NO: 2685 - protein, 11 aa, Homo Sapiens
  misc_feature (1)..(1): Xaa can be any naturally occurring amino acid
XGWQCQWNHAA

SEQ ID NO: 2686 - protein, 10 aa, Homo Sapiens
  misc_feature (1)..(1): Xaa can be any naturally occurring amino acid
XWQCQWNHAA

SEQ ID NO: 2687 - protein, 8 aa, Homo Sapiens
QCQWNHAA

SEQ ID NO: 2688 - protein, 8 aa, Homo Sapiens
  misc_feature (1)..(1): Xaa can be any naturally occurring amino acid
XCQWNHAA

SEQ ID NO: 2689 - protein, 8 aa, Homo Sapiens
  misc_feature (1)..(1): Xaa can be any naturally occurring amino acid
XCQWNHAA

SEQ ID NO: 2690 - protein, 7 aa, Homo Sapiens
  misc_feature (1)..(1): Xaa can be any naturally occurring amino acid
XQWNHAA

SEQ ID NO: 2691 - protein, 7 aa, Homo Sapiens
  misc_feature (1)..(1): Xaa can be any naturally occurring amino acid
XQWNHAA

SEQ ID NO: 2692 - protein, 6 aa, Homo Sapiens
  misc_feature (1)..(1): Xaa can be any naturally occurring amino acid
XWNHAA

SEQ ID NO: 2693 - protein, 6 aa, Homo Sapiens
  misc_feature (1)..(1): Xaa can be any naturally occurring amino acid
XWNHAA

SEQ ID NO: 2694 - protein, 6 aa, Homo Sapiens
  misc_feature (1)..(1): Xaa can be any naturally occurring amino acid
XWNHAA

SEQ ID NO: 2695 - protein, 5 aa, Homo Sapiens
  misc_feature (1)..(1): Xaa can be any naturally occurring amino acid
XNHAA

SEQ ID NO: 2696 - protein, 4 aa, Homo Sapiens
NHAA

SEQ ID NO: 2697 - protein, 4 aa, Homo Sapiens
  misc_feature (1)..(1): Xaa can be any naturally occurring amino acid
XHAA

SEQ ID NO: 2698 - protein, 3 aa, Homo Sapiens
  misc_feature (1)..(1): Xaa can be any naturally occurring amino acid
XAA

SEQ ID NO: 2699 - protein, 3 aa, Homo Sapiens
  misc_feature (1)..(1): Xaa can be any naturally occurring amino acid
XAA

SEQ ID NO: 2700 - protein, 2 aa, Homo Sapiens
AA

SEQ ID NO: 2701 - protein, 2 aa, Homo Sapiens
  misc_feature (1)..(1): Xaa can be any naturally occurring amino acid
XA

SEQ ID NO: 2702 - protein, 2 aa, Homo Sapiens
  misc_feature (1)..(1): Xaa can be any naturally occurring amino acid
XA

SEQ ID NO: 2703 - protein, 1 aa, Homo Sapiens
A

SEQ ID NO: 2704 - protein, 1 aa, Homo Sapiens
  misc_feature (1)..(1): Xaa can be any naturally occurring amino acid
X

SEQ ID NO: 2705 - protein, 1 aa, Homo Sapiens
  misc_feature (1)..(1): Xaa can be any naturally occurring amino acid
X

SEQ ID NO: 2706 - protein, 25 aa, Homo Sapiens
  misc_feature (1)..(1): Xaa can be any naturally occurring amino acid
XDSYQHCRHWTRRFGQVHHYWPSDL

SEQ ID NO: 2707 - protein, 13 aa, Homo Sapiens
  misc_feature (1)..(1): Xaa can be any naturally occurring amino acid
XGSGLHPTTNSSN

SEQ ID NO: 2708 - protein, 13 aa, Homo Sapiens
  misc_feature (1)..(1): Xaa can be any naturally occurring amino acid
XGSGLHPTTNSSN

SEQ ID NO: 2709 - protein, 12 aa, Homo Sapiens
  misc_feature (1)..(1): Xaa can be any naturally occurring amino acid
XSGLHPTTNSSN

SEQ ID NO: 2710 - protein, 10 aa, Homo Sapiens
GLHPTTNSSN

SEQ ID NO: 2711 - protein, 25 aa, Homo Sapiens
  misc_feature (1)..(1): Xaa can be any naturally occurring amino acid
XDSYQHCRHWTRRFGQVHHYWPSDL

SEQ ID NO: 2712 - protein, 10 aa, Homo Sapiens
  misc_feature (1)..(1): Xaa can be any naturally occurring amino acid
XLHPTTNSSN

SEQ ID NO: 2713 - protein, 9 aa, Homo Sapiens
  misc_feature (1)..(1): Xaa can be any naturally occurring amino acid
XHPTTNSSN

SEQ ID NO: 2714 - protein, 9 aa, Homo Sapiens
  misc_feature (1)..(1): Xaa can be any naturally occurring amino acid
XHPTTNSSN

SEQ ID NO: 2715 - protein, 6 aa, Homo Sapiens
  misc_feature (1)..(1): Xaa can be any naturally occurring amino acid
XTNSSN

SEQ ID NO: 2716 - protein, 5 aa, Homo Sapiens
TNSSN

SEQ ID NO: 2717 - protein, 4 aa, Homo Sapiens
NSSN

SEQ ID NO: 2718 - protein, 4 aa, Homo Sapiens
  misc_feature (1)..(1): Xaa can be any naturally occurring amino acid
XSSN

SEQ ID NO: 2719 - protein, 3 aa, Homo Sapiens
  misc_feature (1)..(1): Xaa can be any naturally occurring amino acid
XSN

SEQ ID NO: 2720 - protein, 2 aa, Homo Sapiens
SN

SEQ ID NO: 2721 - protein, 54 aa, Homo Sapiens
  misc_feature (1)..(1): Xaa can be any naturally occurring amino acid
XQALAPASPGCLQNWWYWYCSCWPSGDWCSQTRYGGHLCSSQRYNGSKICRNAP

SEQ ID NO: 2722 - protein, 54 aa, Homo Sapiens; identical to SEQ ID NO: 2721
  misc_feature (1)..(1): Xaa can be any naturally occurring amino acid

SEQ ID NO: 2723 - protein, 53 aa, Homo Sapiens
  misc_feature (1)..(1): Xaa can be any naturally occurring amino acid
XALAPASPGCLQNWWYWYCSCWPSGDWCSQTRYGGHLCSSQRYNGSKICRNAP

SEQ ID NO: 2724 - protein, 52 aa, Homo Sapiens
  misc_feature (1)..(1): Xaa can be any naturally occurring amino acid
XLAPASPGCLQNWWYWYCSCWPSGDWCSQTRYGGHLCSSQRYNGSKICRNAP

SEQ ID NO: 2725 - protein, 51 aa, Homo Sapiens
  misc_feature (1)..(1): Xaa can be any naturally occurring amino acid
XAPASPGCLQNWWYWYCSCWPSGDWCSQTRYGGHLCSSQRYNGSKICRNAP

SEQ ID NO: 2726 - protein, 51 aa, Homo Sapiens; identical to SEQ ID NO: 2725
  misc_feature (1)..(1): Xaa can be any naturally occurring amino acid

SEQ ID NO: 2727 - protein, 50 aa, Homo Sapiens
  misc_feature (1)..(1): Xaa can be any naturally occurring amino acid
XPASPGCLQNWWYWYCSCWPSGDWCSQTRYGGHLCSSQRYNGSKICRNAP

SEQ ID NO: 2728 - protein, 49 aa, Homo Sapiens
  misc_feature (1)..(1): Xaa can be any naturally occurring amino acid
XASPGCLQNWWYWYCSCWPSGDWCSQTRYGGHLCSSQRYNGSKICRNAP

SEQ ID NO: 2729 - protein, 48 aa, Homo Sapiens
  misc_feature (1)..(1): Xaa can be any naturally occurring amino acid
XSPGCLQNWWYWYCSCWPSGDWCSQTRYGGHLCSSQRYNGSKICRNAP

SEQ ID NO: 2730 - protein, 47 aa, Homo Sapiens
SPGCLQNWWYWYCSCWPSGDWCSQTRYGGHLCSSQRYNGSKICRNAP

SEQ ID NO: 2731 - protein, 47 aa, Homo Sapiens
  misc_feature (1)..(1): Xaa can be any naturally occurring amino acid
XPGCLQNWWYWYCSCWPSGDWCSQTRYGGHLCSSQRYNGSKICRNAP

SEQ ID NO: 2732 - protein, 46 aa, Homo Sapiens
  misc_feature (1)..(1): Xaa can be any naturally occurring amino acid
XGCLQNWWYWYCSCWPSGDWCSQTRYGGHLCSSQRYNGSKICRNAP

SEQ ID NO: 2733 - protein, 42 aa, Homo Sapiens
  misc_feature (1)..(1): Xaa can be any naturally occurring amino acid
XNWWYWYCSCWPSGDWCSQTRYGGHLCSSQRYNGSKICRNAP

SEQ ID NO: 2734 - protein, 40 aa, Homo Sapiens
  misc_feature (1)..(1): Xaa can be any naturally occurring amino acid
XWYWYCSCWPSGDWCSQTRYGGHLCSSQRYNGSKICRNAP

SEQ ID NO: 2735 - protein, 39 aa, Homo Sapiens
WYWYCSCWPSGDWCSQTRYGGHLCSSQRYNGSKICRNAP

SEQ ID NO: 2736 - protein, 38 aa, Homo Sapiens
YWYCSCWPSGDWCSQTRYGGHLCSSQRYNGSKICRNAP

SEQ ID NO: 2737 - protein, 35 aa, Homo Sapiens
  misc_feature (1)..(1): Xaa can be any naturally occurring amino acid
XSCWPSGDWCSQTRYGGHLCSSQRYNGSKICRNAP

SEQ ID NO: 2738 - protein, 34 aa, Homo Sapiens
  misc_feature (1)..(1): Xaa can be any naturally occurring amino acid
XCWPSGDWCSQTRYGGHLCSSQRYNGSKICRNAP

SEQ ID NO: 2739 - protein, 33 aa, Homo Sapiens
CWPSGDWCSQTRYGGHLCSSQRYNGSKICRNAP

SEQ ID NO: 2740 - protein, 33 aa, Homo Sapiens
  misc_feature (1)..(1): Xaa can be any naturally occurring amino acid
XWPSGDWCSQTRYGGHLCSSQRYNGSKICRNAP

SEQ ID NO: 2741 - protein, 32 aa, Homo Sapiens
WPSGDWCSQTRYGGHLCSSQRYNGSKICRNAP

SEQ ID NO: 2742 - protein, 31 aa, Homo Sapiens
  misc_feature (1)..(1): Xaa can be any naturally occurring amino acid
XSGDWCSQTRYGGHLCSSQRYNGSKICRNAP

SEQ ID NO: 2743 - protein, 30 aa, Homo Sapiens
  misc_feature (1)..(1): Xaa can be any naturally occurring amino acid
XGDWCSQTRYGGHLCSSQRYNGSKICRNAP

SEQ ID NO: 2744 - protein, 29 aa, Homo Sapiens
GDWCSQTRYGGHLCSSQRYNGSKICRNAP

SEQ ID NO: 2745 - protein, 29 aa, Homo Sapiens
  misc_feature (1)..(1): Xaa can be any naturally occurring amino acid
XDWCSQTRYGGHLCSSQRYNGSKICRNAP

SEQ ID NO: 2746 - protein, 29 aa, Homo Sapiens
  misc_feature (1)..(1): Xaa can be any naturally occurring amino acid
XDWCSQTRYGGHLCSSQRYNGSKICRNAP

SEQ ID NO: 2747 - protein, 26 aa, Homo Sapiens
CSQTRYGGHLCSSQRYNGSKICRNAP

SEQ ID NO: 2748 - protein, 26 aa, Homo Sapiens
  misc_feature (1)..(1): Xaa can be any naturally occurring amino acid
XSQTRYGGHLCSSQRYNGSKICRNAP

SEQ ID NO: 2749 - protein, 26 aa, Homo Sapiens
  misc_feature (1)..(1): Xaa can be any naturally occurring amino acid
XSQTRYGGHLCSSQRYNGSKICRNAP

SEQ ID NO: 2750 - protein, 23 aa, Homo Sapiens
  misc_feature (1)..(1): Xaa can be any naturally occurring amino acid
XRYGGHLCSSQRYNGSKICRNAP

SEQ ID NO: 2751 - protein, 22 aa, Homo Sapiens
  misc_feature (1)..(1): Xaa can be any naturally occurring amino acid
XYGGHLCSSQRYNGSKICRNAP

SEQ ID NO: 2752 - protein, 21 aa, Homo Sapiens
  misc_feature (1)..(1): Xaa can be any naturally occurring amino acid
XHCRHWTRRFGQVHHYWPSDL

SEQ ID NO: 2753 - protein, 20 aa, Homo Sapiens
  misc_feature (1)..(1): Xaa can be any naturally occurring amino acid
XGHLCSSQRYNGSKICRNAP

SEQ ID NO: 2754 - protein, 19 aa, Homo Sapiens
  misc_feature (1)..(1): Xaa can be any naturally occurring amino acid
XHLCSSQRYNGSKICRNAP

SEQ ID NO: 2755 - protein, 17 aa, Homo Sapiens
  misc_feature (1)..(1): Xaa can be any naturally occurring amino acid
XCSSQRYNGSKICRNAP

SEQ ID NO: 2756 - protein, 17 aa, Homo Sapiens
  misc_feature (1)..(1): Xaa can be any naturally occurring amino acid
XCSSQRYNGSKICRNAP

SEQ ID NO: 2757 - protein, 16 aa, Homo Sapiens
  misc_feature (1)..(1): Xaa can be any naturally occurring amino acid
XSSQRYNGSKICRNAP

SEQ ID NO: 2758 - protein, 16 aa, Homo Sapiens
  misc_feature (1)..(1): Xaa can be any naturally occurring amino acid
XSSQRYNGSKICRNAP

SEQ ID NO: 2759 - protein, 13 aa, Homo Sapiens
  misc_feature (1)..(1): Xaa can be any naturally occurring amino acid
XRYNGSKICRNAP

SEQ ID NO: 2760 - protein, 12 aa, Homo Sapiens
  misc_feature (1)..(1): Xaa can be any naturally occurring amino acid
XYNGSKICRNAP

SEQ ID NO: 2761 - protein, 12 aa, Homo Sapiens
  misc_feature (1)..(1): Xaa can be any naturally occurring amino acid
XYNGSKICRNAP

SEQ ID NO: 2762 - protein, 11 aa, Homo Sapiens
  misc_feature (1)..(1): Xaa can be any naturally occurring amino acid
XNGSKICRNAP

SEQ ID NO: 2763 - protein, 9 aa, Homo Sapiens
GSKICRNAP

SEQ ID NO: 2764 - protein, 9 aa, Homo Sapiens
  misc_feature (1)..(1): Xaa can be any naturally occurring amino acid
XSKICRNAP

SEQ ID NO: 2765 - protein, 8 aa, Homo Sapiens
  misc_feature (1)..(1): Xaa can be any naturally occurring amino acid
XKICRNAP

SEQ ID NO: 2766 - protein, 8 aa, Homo Sapiens
  misc_feature (1)..(1): Xaa can be any naturally occurring amino acid
XKICRNAP

SEQ ID NO: 2767 - protein, 7 aa, Homo Sapiens
  misc_feature (1)..(1): Xaa can be any naturally occurring amino acid
XICRNAP

SEQ ID NO: 2768 - protein, 5 aa, Homo Sapiens
  misc_feature (1)..(1): Xaa can be any naturally occurring amino acid
XRNAP

SEQ ID NO: 2769 - protein, 4 aa, Homo Sapiens
  misc_feature (1)..(1): Xaa can be any naturally occurring amino acid
XNAP

SEQ ID NO: 2770 - protein, 3 aa, Homo Sapiens
  misc_feature (1)..(1): Xaa can be any naturally occurring amino acid
XAP

SEQ ID NO: 2771 - protein, 1 aa, Homo Sapiens
  misc_feature (1)..(1): Xaa can be any naturally occurring amino acid
X

SEQ ID NO: 2772 - protein, 4 aa, Homo Sapiens
  misc_feature (1)..(1): Xaa can be any naturally occurring amino acid
XSFE

SEQ ID NO: 2773 - protein, 4 aa, Homo Sapiens
  misc_feature (1)..(1): Xaa can be any naturally occurring amino acid
XSFE

SEQ ID NO: 2774 - protein, 3 aa, Homo Sapiens
  misc_feature (1)..(1): Xaa can be any naturally occurring amino acid
XFE

SEQ ID NO: 2775 - protein, 3 aa, Homo Sapiens
  misc_feature (1)..(1): Xaa can be any naturally occurring amino acid
XFE

SEQ ID NO: 2776 - protein, 2 aa, Homo Sapiens
FE

SEQ ID NO: 2777 - protein, 2 aa, Homo Sapiens
  misc_feature (1)..(1): Xaa can be any naturally occurring amino acid
XE

SEQ ID NO: 2778 - protein, 26 aa, Homo Sapiens
  misc_feature (1)..(1): Xaa can be any naturally occurring amino acid
XSSWGQCGLQCQECVCQGCSSWQRCW

SEQ ID NO: 2779 - protein, 22 aa, Homo Sapiens
  misc_feature (1)..(1): Xaa can be any naturally occurring amino acid
XQCGLQCQECVCQGCSSWQRCW

SEQ ID NO: 2780 - protein, 21 aa, Homo Sapiens
  misc_feature (1)..(1): Xaa can be any naturally occurring amino acid
XCGLQCQECVCQGCSSWQRCW

SEQ ID NO: 2781 - protein, 18 aa, Homo Sapiens
LQCQECVCQGCSSWQRCW

SEQ ID NO: 2782 - protein, 17 aa, Homo Sapiens
  misc_feature (1)..(1): Xaa can be any naturally occurring amino acid
XCQECVCQGCSSWQRCW

SEQ ID NO: 2783 - protein, 15 aa, Homo Sapiens
  misc_feature (1)..(1): Xaa can be any naturally occurring amino acid
XECVCQGCSSWQRCW

SEQ ID NO: 2784 - protein, 30 aa, Homo Sapiens
  misc_feature (1)..(1): Xaa can be any naturally occurring amino acid
XSHRCSVQRGSGPRALRTTPLPFWPNQPHP

SEQ ID NO: 2785 - protein, 14 aa, Homo Sapiens
  misc_feature (1)..(1): Xaa can be any naturally occurring amino acid
XTTPLPFWPNQPHP

SEQ ID NO: 2786 - protein, 29 aa, Homo Sapiens
  misc_feature (1)..(1): Xaa can be any naturally occurring amino acid
XGGSEANSGAAGCLLEDEDFSGGRTSDIG

SEQ ID NO: 2787 - protein, 26 aa, Homo Sapiens
  misc_feature (1)..(1): Xaa can be any naturally occurring amino acid
XEANSGAAGCLLEDEDFSGGRTSDIG

SEQ ID NO: 2788 - protein, 23 aa, Homo Sapiens
  misc_feature (1)..(1): Xaa can be any naturally occurring amino acid
XSGAAGCLLEDEDFSGGRTSDIG

SEQ ID NO: 2789 - protein, 20 aa, Homo Sapiens
  misc_feature (1)..(1): Xaa can be any naturally occurring amino acid
XAGCLLEDEDFSGGRTSDIG

SEQ ID NO: 2790 - protein, 14 aa, Homo Sapiens
  misc_feature (1)..(1): Xaa can be any naturally occurring amino acid
XDEDFSGGRTSDIG

SEQ ID NO: 2791 - protein, 9 aa, Homo Sapiens
  misc_feature (1)..(1): Xaa can be any naturally occurring amino acid
XCLHPVVAL

SEQ ID NO: 2792 - protein, 8 aa, Homo Sapiens
  misc_feature (1)..(1): Xaa can be any naturally occurring amino acid
XLHPVVAL

SEQ ID NO: 2793 - protein, 4 aa, Homo Sapiens
  misc_feature (1)..(1): Xaa can be any naturally occurring amino acid
XVAL

SEQ ID NO: 2794 - protein, 10 aa, Homo Sapiens
  misc_feature (1)..(1): Xaa can be any naturally occurring amino acid
XYQPLVPHLH

SEQ ID NO: 2795 - protein, 8 aa, Homo Sapiens
  misc_feature (1)..(1): Xaa can be any naturally occurring amino acid
XPLVPHLH

SEQ ID NO: 2796 - protein, 15 aa, Homo Sapiens
  misc_feature (1)..(1): Xaa can be any naturally occurring amino acid
XPAPVPGCLGRSETV

SEQ ID NO: 2797 - protein, 12 aa, Homo Sapiens
  misc_feature (1)..(1): Xaa can be any naturally occurring amino acid
XVPGCLGRSETV

SEQ ID NO: 2798 - protein, 2 aa, Homo Sapiens
  misc_feature (1)..(1): Xaa can be any naturally occurring amino acid
XV

SEQ ID NO: 2799 - protein, 5 aa, Homo Sapiens
  misc_feature (1)..(1): Xaa can be any naturally occurring amino acid
XDGPV

SEQ ID NO: 2800 - protein, 2 aa, Homo Sapiens
  misc_feature (1)..(1): Xaa can be any naturally occurring amino acid
XV

SEQ ID NO: 2801 - protein, 7 aa, Homo Sapiens
  misc_feature (1)..(1): Xaa can be any naturally occurring amino acid
XVCRDPT

SEQ ID NO: 2802 - protein, 15 aa, Homo Sapiens
TEREGFTGREAEAPG

SEQ ID NO: 2803 - protein, 15 aa, Homo Sapiens
  misc_feature (1)..(1): Xaa can be any naturally occurring amino acid
XEREGFTGREAEAPG

SEQ ID NO: 2804 - protein, 14 aa, Homo Sapiens
  misc_feature (1)..(1): Xaa can be any naturally occurring amino acid
XREGFTGREAEAPG

SEQ ID NO: 2805 - protein, 14 aa, Homo Sapiens
  misc_feature (1)..(1): Xaa can be any naturally occurring amino acid
XREGFTGREAEAPG

SEQ ID NO: 2806 - protein, 13 aa, Homo Sapiens
  misc_feature (1)..(1): Xaa can be any naturally occurring amino acid
XEGFTGREAEAPG

SEQ ID NO: 2807 - protein, 8 aa, Homo Sapiens
  misc_feature (1)..(1): Xaa can be any naturally occurring amino acid
XREAEAPG

SEQ ID NO: 2808 - protein, 7 aa, Homo Sapiens
  misc_feature (1)..(1): Xaa can be any naturally occurring amino acid
XEAEAPG

SEQ ID NO: 2809 - protein, 4 aa, Homo Sapiens
  misc_feature (1)..(1): Xaa can be any naturally occurring amino acid
XAPG

SEQ ID NO: 2810 - protein, 2 aa, Homo Sapiens
  misc_feature (1)..(1): Xaa can be any naturally occurring amino acid
XG

SEQ ID NO: 2811 - protein, 1 aa, Homo Sapiens
  misc_feature (1)..(1): Xaa can be any naturally occurring amino acid
X

SEQ ID NO: 2812 - protein, 11 aa, Homo Sapiens
  misc_feature (1)..(1): Xaa can be any naturally occurring amino acid
XGGEKGGCPCS

SEQ ID NO: 2813 - protein, 12 aa, Homo Sapiens
  misc_feature (1)..(1): Xaa can be any naturally occurring amino acid
XRSPAQEYLCVG

SEQ ID NO: 2814 - protein, 12 aa, Homo Sapiens
  misc_feature (1)..(1): Xaa can be any naturally occurring amino acid
XRSPAQEYLCVG

SEQ ID NO: 2815 - protein, 17 aa, Homo Sapiens
  misc_feature (1)..(1): Xaa can be any naturally occurring amino acid
XAQQQHPGSFAVSHNAF

SEQ ID NO: 2816 - protein, 1 aa, Homo Sapiens
  misc_feature (1)..(1): Xaa can be any naturally occurring amino acid
X

SEQ ID NO: 2817 - protein, 12 aa, Homo Sapiens
  misc_feature (1)..(1): Xaa can be any naturally occurring amino acid
XVYSQDPCQGDL

SEQ ID NO: 2818 - protein, 5 aa, Homo Sapiens
RESHC

SEQ ID NO: 2819 - protein, 13 aa, Homo Sapiens
  misc_feature (1)..(1): Xaa can be any naturally occurring amino acid
XSCCAQWCFNWYL

SEQ ID NO: 2820 - protein, 6 aa, Homo Sapiens
CFNWYL

SEQ ID NO: 2821 - protein, 3 aa, Homo Sapiens
WYL

SEQ ID NO: 2822 - protein, 2 aa, Homo Sapiens
  misc_feature (1)..(1): Xaa can be any naturally occurring amino acid
XD

SEQ ID NO: 2823 - protein, 10 aa, Homo Sapiens
  misc_feature (1)..(1): Xaa can be any naturally occurring amino acid
XDDRDGWNRK

SEQ ID NO: 2824 - protein, 1 aa, Homo Sapiens
  misc_feature (1)..(1): Xaa can be any naturally occurring amino acid
X

SEQ ID NO: 2825 - protein, 8 aa, Homo Sapiens
  misc_feature (1)..(1): Xaa can be any naturally occurring amino acid
XRLQSWCR

SEQ ID NO: 2826 - protein, 4 aa, Homo Sapiens
  misc_feature (1)..(1): Xaa can be any naturally occurring amino acid
XWCR

SEQ ID NO: 2827 - protein, 4 aa, Homo Sapiens
  misc_feature (1)..(1): Xaa can be any naturally occurring amino acid
XWCR

SEQ ID NO: 2828 - skipped

SEQ ID NO: 2829 - protein, 11 aa, Homo Sapiens
  misc_feature (1)..(1): Xaa can be any naturally occurring amino acid
XEGGPPVPPHR

SEQ ID NO: 2830 - protein, 11 aa, Homo Sapiens
  misc_feature (1)..(1): Xaa can be any naturally occurring amino acid
XEGGPPVPPHR

SEQ ID NO: 2831 - protein, 10 aa, Homo Sapiens
  misc_feature (1)..(1): Xaa can be any naturally occurring amino acid
XGGPPVPPHR

SEQ ID NO: 2832 - protein, 6 aa, Homo Sapiens
  misc_feature (1)..(1): Xaa can be any naturally occurring amino acid
XVPPHR

SEQ ID NO: 2833 - protein, 3 aa, Homo Sapiens
  misc_feature (1)..(1): Xaa can be any naturally occurring amino acid
XQL

SEQ ID NO: 2834 - protein, 59 aa, Homo Sapiens
  misc_feature (1)..(1): Xaa can be any naturally occurring amino acid
XCHQWRFSCWQQAGHAGVHDPPSRCSKLQGSHAHWSRGLPQPEECHQGEIWERCHQCGG

SEQ ID NO: 2835 - protein, 49 aa, Homo Sapiens
  misc_feature (1)..(1): Xaa can be any naturally occurring amino acid
XQAGHAGVHDPPSRCSKLQGSHAHWSRGLPQPEECHQGEIWERCHQCGG

SEQ ID NO: 2836 - protein, 30 aa, Homo Sapiens
  misc_feature (1)..(1): Xaa can be any naturally occurring amino acid
XSHAHWSRGLPQPEECHQGEIWERCHQCGG

SEQ ID NO: 2837 - protein, 29 aa, Homo Sapiens
  misc_feature (1)..(1): Xaa can be any naturally occurring amino acid
XHAHWSRGLPQPEECHQGEIWERCHQCGG

SEQ ID NO: 2838 - protein, 8 aa, Homo Sapiens
  misc_feature (1)..(1): Xaa can be any naturally occurring amino acid
XRCHQCGG

SEQ ID NO: 2839 - protein, 2 aa, Homo Sapiens
  misc_feature (1)..(1): Xaa can be any naturally occurring amino acid
XE

SEQ ID NO: 2840 - protein, 3 aa, Homo Sapiens
  misc_feature (1)..(1): Xaa can be any naturally occurring amino acid
XYV

SEQ ID NO: 2841 - protein, 6 aa, Homo Sapiens
  misc_feature (1)..(1): Xaa can be any naturally occurring amino acid
XLCQPL

SEQ ID NO: 2842 - protein, 3 aa, Homo Sapiens
  misc_feature (1)..(1): Xaa can be any naturally occurring amino acid
XDI

SEQ ID NO: 2843 - protein, 43 aa, Homo Sapiens
  misc_feature (1)..(1): Xaa can be any naturally occurring amino acid
XGDHRPGAQHHEDQDHRTPRAQVLGVDRWLHPGLTVHLPADVD

SEQ ID NO: 2844 - protein, 18 aa, Homo Sapiens
  misc_feature (1)..(1): Xaa can be any naturally occurring amino acid
XDRWLHPGLTVHLPADVD

SEQ ID NO: 2845 - protein, 29 aa, Homo Sapiens
RHGGHGPEGLLRGRRGPEQAWHPDPEVPH

SEQ ID NO: 2846 - protein, 11 aa, Homo Sapiens
  misc_feature (1)..(1): Xaa can be any naturally occurring amino acid
XAWHPDPEVPH

SEQ ID NO: 2847 - protein, 11 aa, Homo Sapiens
  misc_feature (1)..(1): Xaa can be any naturally occurring amino acid
XQQREDDSDYV

SEQ ID NO: 2848 - protein, 70 aa, Homo Sapiens
  misc_feature (1)..(1): Xaa can be any naturally occurring amino acid
XDLQHPGHVRGHPGRAVPLRLWAHHWHCHGLWRRGHPHGAHLRGLRPPPRHPASGPGWPGPDRLPHEDPH

SEQ ID NO: 2849 - protein, 48 aa, Homo Sapiens
  misc_feature (1)..(1): Xaa can be any naturally occurring amino acid
XHHWHCHGLWRRGHPHGAHLRGLRPPPRHPASGPGWPGPDRLPHEDPH

SEQ ID NO: 2850 - protein, 45 aa, Homo Sapiens
WHCHGLWRRGHPHGAHLRGLRPPPRHPASGPGWPGPDRLPHEDPH

SEQ ID NO: 2851 - protein, 38 aa, Homo Sapiens
RRGHPHGAHLRGLRPPPRHPASGPGWPGPDRLPHEDPH

SEQ ID NO: 2852 - protein, 37 aa, Homo Sapiens
  misc_feature (1)..(1): Xaa can be any naturally occurring amino acid
XGHPHGAHLRGLRPPPRHPASGPGWPGPDRLPHEDPH

SEQ ID NO: 2853 - protein, 33 aa, Homo Sapiens
  misc_feature (1)..(1): Xaa can be any naturally occurring amino acid
XGAHLRGLRPPPRHPASGPGWPGPDRLPHEDPH

SEQ ID NO: 2854 - protein, 33 aa, Homo Sapiens; identical to SEQ ID NO: 2853
  misc_feature (1)..(1): Xaa can be any naturally occurring amino acid

SEQ ID NO: 2855 - protein, 32 aa, Homo Sapiens
GAHLRGLRPPPRHPASGPGWPGPDRLPHEDPH

SEQ ID NO: 2856 - protein, 30 aa, Homo Sapiens
  misc_feature (1)..(1): Xaa can be any naturally occurring amino acid
XLRGLRPPPRHPASGPGWPGPDRLPHEDPH

SEQ ID NO: 2857 - protein, 30 aa, Homo Sapiens; identical to SEQ ID NO: 2856
  misc_feature (1)..(1): Xaa can be any naturally occurring amino acid

SEQ ID NO: 2858 - protein, 26 aa, Homo Sapiens
LRPPPRHPASGPGWPGPDRLPHEDPH

SEQ ID NO: 2859 - protein, 25 aa, Homo Sapiens
  misc_feature (1)..(1): Xaa can be any naturally occurring amino acid
XPPPRHPASGPGWPGPDRLPHEDPH

SEQ ID NO: 2860 - protein, 24 aa, Homo Sapiens
  misc_feature (1)..(1): Xaa can be any naturally occurring amino acid
XPPRHPASGPGWPGPDRLPHEDPH

SEQ ID NO: 2861 - protein, 19 aa, Homo Sapiens
  misc_feature (1)..(1): Xaa can be any naturally occurring amino acid
XASGPGWPGPDRLPHEDPH

SEQ ID NO: 2862 - protein, 16 aa, Homo Sapiens
GPGWPGPDRLPHEDPH

SEQ ID NO: 2863 - protein, 14 aa, Homo Sapiens
  misc_feature (1)..(1): Xaa can be any naturally occurring amino acid
XWPGPDRLPHEDPH

SEQ ID NO: 2864 - protein, 8 aa, Homo Sapiens
  misc_feature (1)..(1): Xaa can be any naturally occurring amino acid
XLPHEDPH

SEQ ID NO: 2865 - protein, 4 aa, Homo Sapiens
  misc_feature (1)..(1): Xaa can be any naturally occurring amino acid
XDPH

SEQ ID NO: 2866 - protein, 58 aa, Homo Sapiens
  misc_feature (1)..(1): Xaa can be any naturally occurring amino acid
XARLQLHHHGRAGNRARHQGEAVLRRPGLRAGDGHRRILLFSGEELRAARWPGHHHWQ

SEQ ID NO: 2867 - protein, 57 aa, Homo Sapiens
  misc_feature (1)..(1): Xaa can be any naturally occurring amino acid
XRLQLHHHGRAGNRARHQGEAVLRRPGLRAGDGHRRILLFSGEELRAARWPGHHHWQ

SEQ ID NO: 2868 - protein, 53 aa, Homo Sapiens
  misc_feature (1)..(1): Xaa can be any naturally occurring amino acid
XHHHGRAGNRARHQGEAVLRRPGLRAGDGHRRILLFSGEELRAARWPGHHHWQ

SEQ ID NO: 2869 - protein, 48 aa, Homo Sapiens
  misc_feature (1)..(1): Xaa can be any naturally occurring amino acid
XAGNRARHQGEAVLRRPGLRAGDGHRRILLFSGEELRAARWPGHHHWQ

SEQ ID NO: 2870 - protein, 48 aa, Homo Sapiens; identical to SEQ ID NO: 2869
  misc_feature (1)..(1): Xaa can be any naturally occurring amino acid

SEQ ID NO: 2871 - protein, 46 aa, Homo Sapiens
  misc_feature (1)..(1): Xaa can be any naturally occurring amino acid
XNRARHQGEAVLRRPGLRAGDGHRRILLFSGEELRAARWPGHHHWQ

SEQ ID NO: 2872 - protein, 45 aa, Homo Sapiens
  misc_feature (1)..(1): Xaa can be any naturally occurring amino acid
XRARHQGEAVLRRPGLRAGDGHRRILLFSGEELRAARWPGHHHWQ

SEQ ID NO: 2873 - protein, 44 aa, Homo Sapiens
  misc_feature (1)..(1): Xaa can be any naturally occurring amino acid
XARHQGEAVLRRPGLRAGDGHRRILLFSGEELRAARWPGHHHWQ

SEQ ID NO: 2874 - protein, 39 aa, Homo Sapiens
  misc_feature (1)..(1): Xaa can be any naturally occurring amino acid
XEAVLRRPGLRAGDGHRRILLFSGEELRAARWPGHHHWQ

SEQ ID NO: 2875 - protein, 38 aa, Homo Sapiens
  misc_feature (1)..(1): Xaa can be any naturally occurring amino acid
XAVLRRPGLRAGDGHRRILLFSGEELRAARWPGHHHWQ

SEQ ID NO: 2876 - protein, 34 aa, Homo Sapiens
  misc_feature (1)..(1): Xaa can be any naturally occurring amino acid
XRPGLRAGDGHRRILLFSGEELRAARWPGHHHWQ

SEQ ID NO: 2877 - protein, 33 aa, Homo Sapiens
  misc_feature (1)..(1): Xaa can be any naturally occurring amino acid
XPGLRAGDGHRRILLFSGEELRAARWPGHHHWQ

SEQ ID NO: 2878 - protein, 32 aa, Homo Sapiens
  misc_feature (1)..(1): Xaa can be any naturally occurring amino acid
XGLRAGDGHRRILLFSGEELRAARWPGHHHWQ

SEQ ID NO: 2879 - protein, 29 aa, Homo Sapiens
  misc_feature (1)..(1): Xaa can be any naturally occurring amino acid
XAGDGHRRILLFSGEELRAARWPGHHHWQ

SEQ ID NO: 2880 - protein, 29 aa, Homo Sapiens
  misc_feature (1)..(1): Xaa can be any naturally occurring amino acid
XAGDGHRRILLFSGEELRAARWPGHHHWQ

SEQ ID NO: 2881 - protein, 18 aa, Homo Sapiens
  misc_feature (1)..(1): Xaa can be any naturally occurring amino acid
XSGEELRAARWPGHHHWQ

SEQ ID NO: 2882 - protein, 8 aa, Homo Sapiens
  misc_feature (1)..(1): Xaa can be any naturally occurring amino acid
XRDRRAGH

SEQ ID NO: 2883 - protein, 9 aa, Homo Sapiens
  misc_feature (1)..(1): Xaa can be any naturally occurring amino acid
XWPGHHHWQ

SEQ ID NO: 2884 - protein, 6 aa, Homo Sapiens
  misc_feature (1)..(1): Xaa can be any naturally occurring amino acid
XHHHWQ

SEQ ID NO: 2885 - protein, 1 aa, Homo Sapiens
Q

SEQ ID NO: 2886 - protein, 1 aa, Homo Sapiens
  misc_feature (1)..(1): Xaa can be any naturally occurring amino acid
X

SEQ ID NO: 2887 - protein, 32 aa, Homo Sapiens
  misc_feature (1)..(1): Xaa can be any naturally occurring amino acid
XVPVSGGAVPAFLPGYGILRHPRDHLQLHHEV

SEQ ID NO: 2888 - protein, 31 aa, Homo Sapiens
  misc_feature (1)..(1): Xaa can be any naturally occurring amino acid
XPVSGGAVPAFLPGYGILRHPRDHLQLHHEV

SEQ ID NO: 2889 - protein, 27 aa, Homo Sapiens
GGAVPAFLPGYGILRHPRDHLQLHHEV

SEQ ID NO: 2890 - protein, 27 aa, Homo Sapiens
  misc_feature (1)..(1): Xaa can be any naturally occurring amino acid
XGAVPAFLPGYGILRHPRDHLQLHHEV

SEQ ID NO: 2891 - protein, 21 aa, Homo Sapiens
FLPGYGILRHPRDHLQLHHEV

SEQ ID NO: 2892 - protein, 20 aa, Homo Sapiens
  misc_feature (1)..(1): Xaa can be any naturally occurring amino acid
XPGYGILRHPRDHLQLHHEV

SEQ ID NO: 2893 - protein, 20 aa, Homo Sapiens
  misc_feature (1)..(1): Xaa can be any naturally occurring amino acid
XPGYGILRHPRDHLQLHHEV

SEQ ID NO: 2894 - protein, 19 aa, Homo Sapiens
  misc_feature (1)..(1): Xaa can be any naturally occurring amino acid
XGYGILRHPRDHLQLHHEV

SEQ ID NO: 2895 - protein, 15 aa, Homo Sapiens
  misc_feature (1)..(1): Xaa can be any naturally occurring amino acid
XLRHPRDHLQLHHEV

SEQ ID NO: 2896 - protein, 2 aa, Homo Sapiens
  misc_feature (1)..(1): Xaa can be any naturally occurring amino acid
XV

SEQ ID NO: 2897 - protein, 71 aa, Homo Sapiens
  misc_feature (1)..(1): Xaa can be any naturally occurring amino acid
XGHPQRPVRQHGAVGRHHHVPGHCRQDAEGDHRPGAQHHEDQDHRTPRAQVLGVDRWLHPGLTVHLPADVD

SEQ ID NO: 2898 - protein, 62 aa, Homo Sapiens
  misc_feature (1)..(1): Xaa can be any naturally occurring amino acid
XHGAVGRHHHVPGHCRQDAEGDHRPGAQHHEDQDHRTPRAQVLGVDRWLHPGLTVHLPADVD

SEQ ID NO: 2899 - protein, 60 aa, Homo Sapiens
  misc_feature (1)..(1): Xaa can be any naturally occurring amino acid
XAVGRHHHVPGHCRQDAEGDHRPGAQHHEDQDHRTPRAQVLGVDRWLHPGLTVHLPADVD

SEQ ID NO: 2900 - protein, 46 aa, Homo Sapiens
GHRDRGRRSHGQAPASAAGGAHGACLGAGRLHRGSCSQCRNRICCC

SEQ ID NO: 2901 - protein, 11 aa, Homo Sapiens
  misc_feature (1)..(1): Xaa can be any naturally occurring amino acid
XFHSMGCWWSR

SEQ ID NO: 2902 - protein, 14 aa, Homo Sapiens
  misc_feature (1)..(1): Xaa can be any naturally occurring amino acid
XRSHQNQTICSHSC

SEQ ID NO: 2903 - protein, 1 aa, Homo Sapiens
  misc_feature (1)..(1): Xaa can be any naturally occurring amino acid
X

SEQ ID NO: 2904 - protein, 1 aa, Homo Sapiens
  misc_feature (1)..(1): Xaa can be any naturally occurring amino acid
X

SEQ ID NO: 2905 - protein, 13 aa, Homo Sapiens
WAESHRSRVTGHD

SEQ ID NO: 2906 - protein, 1 aa, Homo Sapiens
  misc_feature (1)..(1): Xaa can be any naturally occurring amino acid
X

SEQ ID NO: 2907 - protein, 12 aa, Homo Sapiens
  misc_feature (1)..(1): Xaa can be any naturally occurring amino acid
XNDGKKNERHRQ

SEQ ID NO: 2908 - protein, 6 aa, Homo Sapiens
WREVNR

SEQ ID NO: 2909 - protein, 1 aa, Homo Sapiens
R

SEQ ID NO: 2910 - protein, 2 aa, Homo Sapiens
  misc_feature (1)..(1): Xaa can be any naturally occurring amino acid
XL

SEQ ID NO: 2911 - protein, 1 aa, Homo Sapiens
  misc_feature (1)..(1): Xaa can be any naturally occurring amino acid
X

SEQ ID NO: 2912 - protein, 9 aa, Homo Sapiens
  misc_feature (1)..(1): Xaa can be any naturally occurring amino acid
XVKTLYRMC

SEQ ID NO: 2913 - protein, 54 aa, Homo Sapiens
  misc_feature (1)..(1): Xaa can be any naturally occurring amino acid
XGGPHGPHGLQGVRPLDHQPQQEHKRKRETLTAGESLPHSVPHHTESPLLTVAM

SEQ ID NO: 2914 - protein, 53 aa, Homo Sapiens
  misc_feature (1)..(1): Xaa can be any naturally occurring amino acid
XGPHGPHGLQGVRPLDHQPQQEHKRKRETLTAGESLPHSVPHHTESPLLTVAM

SEQ ID NO: 2915 - protein, 3 aa, Homo Sapiens
  misc_feature (1)..(1): Xaa can be any naturally occurring amino acid
XCF

SEQ ID NO: 2916 - protein, 1 aa, Homo Sapiens
  misc_feature (1)..(1): Xaa can be any naturally occurring amino acid
X

SEQ ID NO: 2917 - protein, 2 aa, Homo Sapiens
  misc_feature (1)..(1): Xaa can be any naturally occurring amino acid
XH

SEQ ID NO: 2918 - protein, 9 aa, Homo Sapiens
  misc_feature (1)..(1): Xaa can be any naturally occurring amino acid
XLHGLHVPI

SEQ ID NO: 2919 - protein, 1 aa, Homo Sapiens
  misc_feature (1)..(1): Xaa can be any naturally occurring amino acid
X

SEQ ID NO: 2920 - protein, 8 aa, Homo Sapiens
QIPWHRQG

SEQ ID NO: 2921 - protein, 4 aa, Homo Sapiens
HRQG

SEQ ID NO: 2922 - protein, 23 aa, Homo Sapiens
  misc_feature (1)..(1): Xaa can be any naturally occurring amino acid
XWKSHHHLPGARSLQNQVGRCWR

SEQ ID NO: 2923 - protein, 31 aa, Homo Sapiens
  misc_feature (1)..(1): Xaa can be any naturally occurring amino acid
XLWYRGRTHDHSPCHHCHPEDCGWPLRETVA

SEQ ID NO: 2924 - protein, 15 aa, Homo Sapiens
  misc_feature (1)..(1): Xaa can be any naturally occurring amino acid
XHPEDCGWPLRETVA

SEQ ID NO: 2925 - protein, 12 aa, Homo Sapiens
  misc_feature (1)..(1): Xaa can be any naturally occurring amino acid
XDCGWPLRETVA

SEQ ID NO: 2926 - protein, 11 aa, Homo Sapiens
  misc_feature (1)..(1): Xaa can be any naturally occurring amino acid
XCGWPLRETVA

SEQ ID NO: 2927 - protein, 8 aa, Homo Sapiens
  misc_feature (1)..(1): Xaa can be any naturally occurring amino acid
XPLRETVA

SEQ ID NO: 2928 - protein, 5 aa, Homo Sapiens
  misc_feature (1)..(1): Xaa can be any naturally occurring amino acid
XETVA

SEQ ID NO: 2929 - protein, 2 aa, Homo Sapiens
VA

SEQ ID NO: 2930 - protein, 1 aa, Homo Sapiens
  misc_feature (1)..(1): Xaa can be any naturally occurring amino acid
X

SEQ ID NO: 2931 - protein, 24 aa, Homo Sapiens
  misc_feature (1)..(1): Xaa can be any naturally occurring amino acid
XPRGSPEHHPCLYWRCQGCGQGHP

SEQ ID NO: 2932 - protein, 23 aa, Homo Sapiens
PRGSPEHHPCLYWRCQGCGQGHP

SEQ ID NO: 2933 - protein, 22 aa, Homo Sapiens
  misc_feature (1)..(1): Xaa can be any naturally occurring amino acid
XGSPEHHPCLYWRCQGCGQGHP

SEQ ID NO: 2934 - protein, 21 aa, Homo Sapiens
  misc_feature (1)..(1): Xaa can be any naturally occurring amino acid
XSPEHHPCLYWRCQGCGQGHP

SEQ ID NO: 2935 - protein, 19 aa, Homo Sapiens
  misc_feature (1)..(1): Xaa can be any naturally occurring amino acid
XEHHPCLYWRCQGCGQGHP

SEQ ID NO: 2936 - protein, 18 aa, Homo Sapiens
  misc_feature (1)..(1): Xaa can be any naturally occurring amino acid
XHHPCLYWRCQGCGQGHP

SEQ ID NO: 2937 - protein, 14 aa, Homo Sapiens
CLYWRCQGCGQGHP

SEQ ID NO: 2938 - protein, 14 aa, Homo Sapiens
  misc_feature (1)..(1): Xaa can be any naturally occurring amino acid
XLYWRCQGCGQGHP

SEQ ID NO: 2939 - protein, 14 aa, Homo Sapiens
  misc_feature (1)..(1): Xaa can be any naturally occurring amino acid
XLYWRCQGCGQGHP

SEQ ID NO: 2940 - protein, 11 aa, Homo Sapiens
  misc_feature (1)..(1): Xaa can be any naturally occurring amino acid
XRCQGCGQGHP

SEQ ID NO: 2941 - protein, 7 aa, Homo Sapiens
  misc_feature (1)..(1): Xaa can be any naturally occurring amino acid
XCGQGHP

SEQ ID NO: 2942 - protein, 6 aa, Homo Sapiens
CGQGHP

SEQ ID NO: 2943 - protein, 6 aa, Homo Sapiens
  misc_feature (1)..(1): Xaa can be any naturally occurring amino acid
XGQGHP

SEQ ID NO: 2944 - skipped

SEQ ID NO: 2945 - protein, 31 aa, Homo Sapiens
EREAHWHGLPCPHCQRVSGGPDLPSRKTCQI

SEQ ID NO: 2946 - protein, 31 aa, Homo Sapiens
  misc_feature (1)..(1): Xaa can be any naturally occurring amino acid
XREAHWHGLPCPHCQRVSGGPDLPSRKTCQI

SEQ ID NO: 2947 - protein, 30 aa, Homo Sapiens
  misc_feature (1)..(1): Xaa can be any naturally occurring amino acid
XEAHWHGLPCPHCQRVSGGPDLPSRKTCQI

SEQ ID NO: 2948 - protein, 29 aa, Homo Sapiens
  misc_feature (1)..(1): Xaa can be any naturally occurring amino acid
XAHWHGLPCPHCQRVSGGPDLPSRKTCQI

SEQ ID NO: 2949 - protein, 25 aa, Homo Sapiens
HGLPCPHCQRVSGGPDLPSRKTCQI

SEQ ID NO: 2950 - protein, 25 aa, Homo Sapiens
  misc_feature (1)..(1): Xaa can be any naturally occurring amino acid
XGLPCPHCQRVSGGPDLPSRKTCQI

SEQ ID NO: 2951 - protein, 24 aa, Homo Sapiens
  misc_feature (1)..(1): Xaa can be any naturally occurring amino acid
XLPCPHCQRVSGGPDLPSRKTCQI

SEQ ID NO: 2952 - protein, 12 aa, Homo Sapiens
  misc_feature (1)..(1): Xaa can be any naturally occurring amino acid
XPDLPSRKTCQI

SEQ ID NO: 2953 - protein, 8 aa, Homo Sapiens
  misc_feature (1)..(1): Xaa can be any naturally occurring amino acid
XQGHPGLH

SEQ ID NO: 2954 - protein, 7 aa, Homo Sapiens
  misc_feature (1)..(1): Xaa can be any naturally occurring amino acid
XGHPGLH

SEQ ID NO: 2955 - protein, 16 aa, Homo Sapiens
  misc_feature (1)..(1): Xaa can be any naturally occurring amino acid
XWHCPQRPLCQAHFLV

SEQ ID NO: 2956 - protein, 45 aa, Homo Sapiens
  misc_feature (1)..(1): Xaa can be any naturally occurring amino acid
XVPRWSVLPCGLLPGPRRSQLQLLPSPSGQMAHNTEQASGWPLPG

SEQ ID NO: 2957 - protein, 54 aa, Homo Sapiens
  misc_feature (1)..(1): Xaa can be any naturally occurring amino acid
XGFSHQGYNCWWWCHSTHPQISDWEERTTEDCLKDAWIPCYLRTLNTLTAVQCW

SEQ ID NO: 2958 - protein, 32 aa, Homo Sapiens
  misc_feature (1)..(1): Xaa can be any naturally occurring amino acid
XGDPGAAVPDLGHICGAVHGQQPLPGHGQHHC

SEQ ID NO: 2959 - protein, 28 aa, Homo Sapiens
  misc_feature (1)..(1): Xaa can be any naturally occurring amino acid
XAAVPDLGHICGAVHGQQPLPGHGQHHC

SEQ ID NO: 2960 - protein, 17 aa, Homo Sapiens
  misc_feature (1)..(1): Xaa can be any naturally occurring amino acid
XAVHGQQPLPGHGQHHC

SEQ ID NO: 2961 - protein, 16 aa, Homo Sapiens
  misc_feature (1)..(1): Xaa can be any naturally occurring amino acid
XPDPGSLPGATASCGY

SEQ ID NO: 2962 - protein, 4 aa, Homo Sapiens
  misc_feature (1)..(1): Xaa can be any naturally occurring amino acid
XCAV

SEQ ID NO: 2963 - protein, 5 aa, Homo Sapiens
MGGHA

SEQ ID NO: 2964-2965 - skipped (2 entries)

SEQ ID NO: 2966 - protein, 2 aa, Homo Sapiens
  misc_feature (1)..(1): Xaa can be any naturally occurring amino acid
XS

SEQ ID NO: 2967 - protein, 1 aa, Homo Sapiens
  misc_feature (1)..(1): Xaa can be any naturally occurring amino acid
X

SEQ ID NO: 2968 - protein, 11 aa, Homo Sapiens
  misc_feature (1)..(1): Xaa can be any naturally occurring amino acid
XALCAYSAIPY

SEQ ID NO: 2969 - protein, 10 aa, Homo Sapiens
  misc_feature (1)..(1): Xaa can be any naturally occurring amino acid
XLCAYSAIPY

SEQ ID NO: 2970 - protein, 9 aa, Homo Sapiens
  misc_feature (1)..(1): Xaa can be any naturally occurring amino acid
XCAYSAIPY

SEQ ID NO: 2971 - protein, 9 aa, Homo Sapiens
  misc_feature (1)..(1): Xaa can be any naturally occurring amino acid
XRLFCDRQF

SEQ ID NO: 2972 - protein, 2 aa, Homo Sapiens
  misc_feature (1)..(1): Xaa can be any naturally occurring amino acid
XC

SEQ ID NO: 2973 - protein, 14 aa, Homo Sapiens
  misc_feature (1)..(1): Xaa can be any naturally occurring amino acid
XRCFSPGIESRNGN

SEQ ID NO: 2974 - protein, 1 aa, Homo Sapiens
  misc_feature (1)..(1): Xaa can be any naturally occurring amino acid
X

SEQ ID NO: 2975 - protein, 2 aa, Homo Sapiens
  misc_feature (1)..(1): Xaa can be any naturally occurring amino acid
XG

SEQ ID NO: 2976 - protein, 3 aa, Homo Sapiens
WGL

SEQ ID NO: 2977 - protein, 9 aa, Homo Sapiens
  misc_feature (1)..(1): Xaa can be any naturally occurring amino acid
XVWFRASAY

SEQ ID NO: 2978 - protein, 20 aa, Homo Sapiens
  misc_feature (1)..(1): Xaa can be any naturally occurring amino acid
XGGGCETLKYIWKAVCPWRW

SEQ ID NO: 2979 - protein, 32 aa, Homo Sapiens
  misc_feature (1)..(1): Xaa can be any naturally occurring amino acid
XNSSPDQGGETCTDCSPWQQPPGHCQASGGSL

SEQ ID NO: 2980 - protein, 11 aa, Homo Sapiens
  misc_feature (1)..(1): Xaa can be any naturally occurring amino acid
XHFEGCSSQNV

SEQ ID NO: 2981 - protein, 9 aa, Homo Sapiens
  misc_feature (1)..(1): Xaa can be any naturally occurring amino acid
XEGCSSQNV

SEQ ID NO: 2982 - protein, 29 aa, Homo Sapiens
  misc_feature (1)..(1): Xaa can be any naturally occurring amino acid
XRRPKSILQGGCSSLDETDTIHHDEVRLL

SEQ ID NO: 2983 - protein, 36 aa, Homo Sapiens
  misc_feature (1)..(1): Xaa can be any naturally occurring amino acid
XRRNEPSWGGVLCSQPLRVSPEAPSRAESPEAAGVQ

SEQ ID NO: 2984 - protein, 28 aa, Homo Sapiens
  misc_feature (1)..(1): Xaa can be any naturally occurring amino acid
XGVLCSQPLRVSPEAPSRAESPEAAGVQ

SEQ ID NO: 2985 - protein, 31 aa, Homo Sapiens
  misc_feature (1)..(1): Xaa can be any naturally occurring amino acid
XGPQVPPHYWWLSPGSLEKAQYSPAPPLPLI

SEQ ID NO: 2986 - protein, 29 aa, Homo Sapiens
PQVPPHYWWLSPGSLEKAQYSPAPPLPLI

SEQ ID NO: 2987 - protein, 14 aa, Homo Sapiens
  misc_feature (1)..(1): Xaa can be any naturally occurring amino acid
XKAQYSPAPPLPLI

SEQ ID NO: 2988 - protein, 2 aa, Homo Sapiens
  misc_feature (1)..(1): Xaa can be any naturally occurring amino acid
XV

SEQ ID NO: 2989 - protein, 31 aa, Homo Sapiens
  misc_feature (1)..(1): Xaa can be any naturally occurring amino acid
XRFRQWHPGPGSRPWTGPGPRPRSSRRQGRG

SEQ ID NO: 2990 - protein, 28 aa, Homo Sapiens
  misc_feature (1)..(1): Xaa can be any naturally occurring amino acid
XQWHPGPGSRPWTGPGPRPRSSRRQGRG

SEQ ID NO: 2991 - protein, 24 aa, Homo Sapiens
  misc_feature (1)..(1): Xaa can be any naturally occurring amino acid
XGPGSRPWTGPGPRPRSSRRQGRG

SEQ ID NO: 2992 - protein, 18 aa, Homo Sapiens
  misc_feature (1)..(1): Xaa can be any naturally occurring amino acid
XWTGPGPRPRSSRRQGRG

SEQ ID NO: 2993 - protein, 16 aa, Homo Sapiens
  misc_feature (1)..(1): Xaa can be any naturally occurring amino acid
XGPGPRPRSSRRQGRG

SEQ ID NO: 2994 - protein, 15 aa, Homo Sapiens
  misc_feature (1)..(1): Xaa can be any naturally occurring amino acid
XPGPRPRSSRRQGRG

SEQ ID NO: 2995 - protein, 14 aa, Homo Sapiens
  misc_feature (1)..(1): Xaa can be any naturally occurring amino acid
XGPRPRSSRRQGRG

SEQ ID NO: 2996 - protein, 12 aa, Homo Sapiens
  misc_feature (1)..(1): Xaa can be any naturally occurring amino acid
XRPRSSRRQGRG

SEQ ID NO: 2997 - protein, 11 aa, Homo Sapiens
  misc_feature (1)..(1): Xaa can be any naturally occurring amino acid
XPRSSRRQGRG

SEQ ID NO: 2998 - protein, 10 aa, Homo Sapiens
  misc_feature (1)..(1): Xaa can be any naturally occurring amino acid
XRSSRRQGRG

SEQ ID NO: 2999 - protein, 9 aa, Homo Sapiens
  misc_feature (1)..(1): Xaa can be any naturally occurring amino acid
XSSRRQGRG

SEQ ID NO: 3000 - protein, 6 aa, Homo Sapiens
  misc_feature (1)..(1): Xaa can be any naturally occurring amino acid
XRQGRG

SEQ ID NO: 3001 - protein, 5 aa, Homo Sapiens
  misc_feature (1)..(1): Xaa can be any naturally occurring amino acid
XQGRG

SEQ ID NO: 3002 - protein, 4 aa, Homo Sapiens
  misc_feature (1)..(1): Xaa can be any naturally occurring amino acid
XGRG

SEQ ID NO: 3003 - protein, 2 aa, Homo Sapiens
  misc_feature (1)..(1): Xaa can be any naturally occurring amino acid
XG

SEQ ID NO: 3004 - protein, 31 aa, Homo Sapiens
  misc_feature (1)..(1): Xaa can be any naturally occurring amino acid
XGVDARHQVGPLGQGHEDQVPGGDLSLLPAY

SEQ ID NO: 3005 - protein, 26 aa, Homo Sapiens
  misc_feature (1)..(1): Xaa can be any naturally occurring amino acid
XHQVGPLGQGHEDQVPGGDLSLLPAY

SEQ ID NO: 3006 - protein, 24 aa, Homo Sapiens
  misc_feature (1)..(1): Xaa can be any naturally occurring amino acid
XVGPLGQGHEDQVPGGDLSLLPAY

SEQ ID NO: 3007 - protein, 21 aa, Homo Sapiens
  misc_feature (1)..(1): Xaa can be any naturally occurring amino acid
XLGQGHEDQVPGGDLSLLPAY

SEQ ID NO: 3008 - protein, 18 aa, Homo Sapiens
  misc_feature (1)..(1): Xaa can be any naturally occurring amino acid
XGHEDQVPGGDLSLLPAY

SEQ ID NO: 3009 - protein, 17 aa, Homo Sapiens
  misc_feature (1)..(1): Xaa can be any naturally occurring amino acid
XHEDQVPGGDLSLLPAY

SEQ ID NO: 3010 - protein, 13 aa, Homo Sapiens
  misc_feature (1)..(1): Xaa can be any naturally occurring amino acid
XVPGGDLSLLPAY

SEQ ID NO: 3011 - protein, 7 aa, Homo Sapiens
  misc_feature (1)..(1): Xaa can be any naturally occurring amino acid
XGGLSQG

SEQ ID NO: 3012 - protein, 6 aa, Homo Sapiens
  misc_feature (1)..(1): Xaa can be any naturally occurring amino acid
XGLSQG

SEQ ID NO: 3013 - protein, 6 aa, Homo Sapiens
  misc_feature (1)..(1): Xaa can be any naturally occurring amino acid
XGLSQG

SEQ ID NO: 3014 - protein, 1 aa, Homo Sapiens
  misc_feature (1)..(1): Xaa can be any naturally occurring amino acid
X

SEQ ID NO: 3015 - protein, 35 aa, Homo Sapiens
  misc_feature (1)..(1): Xaa can be any naturally occurring amino acid
XEDYASAEADPCRPAHQVQGICCYRGLQWPRRSGC

SEQ ID NO: 3016 - protein, 34 aa, Homo Sapiens
  misc_feature (1)..(1): Xaa can be any naturally occurring amino acid
XDYASAEADPCRPAHQVQGICCYRGLQWPRRSGC

SEQ ID NO: 3017 - protein, 25 aa, Homo Sapiens
  misc_feature (1)..(1): Xaa can be any naturally occurring amino acid
XCRPAHQVQGICCYRGLQWPRRSGC

SEQ ID NO: 3018 - protein, 14 aa, Homo Sapiens
  misc_feature (1)..(1): Xaa can be any naturally occurring amino acid
XCYRGLQWPRRSGC

SEQ ID NO: 3019 - protein, 13 aa, Homo Sapiens
  misc_feature (1)..(1): Xaa can be any naturally occurring amino acid
XYRGLQWPRRSGC

SEQ ID NO: 3020 - protein, 10 aa, Homo Sapiens
  misc_feature (1)..(1): Xaa can be any naturally occurring amino acid
XLQWPRRSGC

SEQ ID NO: 3021 - protein, 8 aa, Homo Sapiens
  misc_feature (1)..(1): Xaa can be any naturally occurring amino acid
XWPRRSGC

SEQ ID NO: 3022 - protein, 7 aa, Homo Sapiens
  misc_feature (1)..(1): Xaa can be any naturally occurring amino acid
XPRRSGC

SEQ ID NO: 3023 - protein, 69 aa, Homo Sapiens
  misc_feature (1)..(1): Xaa can be any naturally occurring amino acid
XVLQGGGHRHPWGHHPGQALHRPRAQRLLGEQDRQAPHCPLQGDRPLRLCAGTPHPCTQGHWHRLRTCA

SEQ ID NO: 3024 - protein, 66 aa, Homo Sapiens
  misc_feature (1)..(1): Xaa can be any naturally occurring amino acid
XGGGHRHPWGHHPGQALHRPRAQRLLGEQDRQAPHCPLQGDRPLRLCAGTPHPCTQGHWHRLRTCA

SEQ ID NO: 3025 - protein, 65 aa, Homo Sapiens
  misc_feature (1)..(1): Xaa can be any naturally occurring amino acid
XGGHRHPWGHHPGQALHRPRAQRLLGEQDRQAPHCPLQGDRPLRLCAGTPHPCTQGHWHRLRTCA

SEQ ID NO: 3026 - protein, 64 aa, Homo Sapiens
  misc_feature (1)..(1): Xaa can be any naturally occurring amino acid
XGHRHPWGHHPGQALHRPRAQRLLGEQDRQAPHCPLQGDRPLRLCAGTPHPCTQGHWHRLRTCA

SEQ ID NO: 3027 - protein, 63 aa, Homo Sapiens
GHRHPWGHHPGQALHRPRAQRLLGEQDRQAPHCPLQGDRPLRLCAGTPHPCTQGHWHRLRTCA

SEQ ID NO: 3028 - protein, 59 aa, Homo Sapiens
  misc_feature (1)..(1): Xaa can be any naturally occurring amino acid
XWGHHPGQALHRPRAQRLLGEQDRQAPHCPLQGDRPLRLCAGTPHPCTQGHWHRLRTCA

SEQ ID NO: 3029 - protein, 53 aa, Homo Sapiens
  misc_feature (1)..(1): Xaa can be any naturally occurring amino acid
XQALHRPRAQRLLGEQDRQAPHCPLQGDRPLRLCAGTPHPCTQGHWHRLRTCA

SEQ ID NO: 3030 - protein, 52 aa, Homo Sapiens
  misc_feature (1)..(1): Xaa can be any naturally occurring amino acid
XALHRPRAQRLLGEQDRQAPHCPLQGDRPLRLCAGTPHPCTQGHWHRLRTCA

SEQ ID NO: 3031 - protein, 48 aa, Homo Sapiens
  misc_feature (1)..(1): Xaa can be any naturally occurring amino acid
XPRAQRLLGEQDRQAPHCPLQGDRPLRLCAGTPHPCTQGHWHRLRTCA

SEQ ID NO: 3032 - protein, 46 aa, Homo Sapiens
  misc_feature (1)..(1): Xaa can be any naturally occurring amino acid
XAQRLLGEQDRQAPHCPLQGDRPLRLCAGTPHPCTQGHWHRLRTCA

SEQ ID NO: 3033 - protein, 45 aa, Homo Sapiens
  misc_feature (1)..(1): Xaa can be any naturally occurring amino acid
XQRLLGEQDRQAPHCPLQGDRPLRLCAGTPHPCTQGHWHRLRTCA

SEQ ID NO: 3034 - protein, 44 aa, Homo Sapiens
  misc_feature (1)..(1): Xaa can be any naturally occurring amino acid
XRLLGEQDRQAPHCPLQGDRPLRLCAGTPHPCTQGHWHRLRTCA

SEQ ID NO: 3035 - protein, 41 aa, Homo Sapiens
  misc_feature (1)..(1): Xaa can be any naturally occurring amino acid
XGEQDRQAPHCPLQGDRPLRLCAGTPHPCTQGHWHRLRTCA

SEQ ID NO: 3036 - protein, 39 aa, Homo Sapiens
  misc_feature (1)..(1): Xaa can be any naturally occurring amino acid
XQDRQAPHCPLQGDRPLRLCAGTPHPCTQGHWHRLRTCA

SEQ ID NO: 3037 - protein, 38 aa, Homo Sapiens
  misc_feature (1)..(1): Xaa can be any naturally occurring amino acid
XDRQAPHCPLQGDRPLRLCAGTPHPCTQGHWHRLRTCA

SEQ ID NO: 3038 - protein, 38 aa, Homo Sapiens; identical to SEQ ID NO: 3037
  misc_feature (1)..(1): Xaa can be any naturally occurring amino acid

SEQ ID NO: 3039 - protein, 35 aa, Homo Sapiens
  misc_feature (1)..(1): Xaa can be any naturally occurring amino acid
XAPHCPLQGDRPLRLCAGTPHPCTQGHWHRLRTCA

SEQ ID NO: 3040 - protein, 32 aa, Homo Sapiens
  misc_feature (1)..(1): Xaa can be any naturally occurring amino acid
XCPLQGDRPLRLCAGTPHPCTQGHWHRLRTCA

SEQ ID NO: 3041 - protein, 31 aa, Homo Sapiens
  misc_feature (1)..(1): Xaa can be any naturally occurring amino acid
XPLQGDRPLRLCAGTPHPCTQGHWHRLRTCA

SEQ ID NO: 3042 - protein, 29 aa, Homo Sapiens
LQGDRPLRLCAGTPHPCTQGHWHRLRTCA

SEQ ID NO: 3043 - protein, 29 aa, Homo Sapiens
  misc_feature (1)..(1): Xaa can be any naturally occurring amino acid
XQGDRPLRLCAGTPHPCTQGHWHRLRTCA

SEQ ID NO: 3044 - protein, 28 aa, Homo Sapiens
  misc_feature (1)..(1): Xaa can be any naturally occurring amino acid
XGDRPLRLCAGTPHPCTQGHWHRLRTCA

SEQ ID NO: 3045 - protein, 27 aa, Homo Sapiens
  misc_feature (1)..(1): Xaa can be any naturally occurring amino acid
XDRPLRLCAGTPHPCTQGHWHRLRTCA

SEQ ID NO: 3046 - protein, 26 aa, Homo Sapiens
DRPLRLCAGTPHPCTQGHWHRLRTCA

SEQ ID NO: 3047 - protein, 25 aa, Homo Sapiens
  misc_feature (1)..(1): Xaa can be any naturally occurring amino acid
XPLRLCAGTPHPCTQGHWHRLRTCA

SEQ ID NO: 3048 - protein, 23 aa, Homo Sapiens
  misc_feature (1)..(1): Xaa can be any naturally occurring amino acid
XRLCAGTPHPCTQGHWHRLRTCA

SEQ ID NO: 3049 - protein, 22 aa, Homo Sapiens
  misc_feature (1)..(1): Xaa can be any naturally occurring amino acid
XLCAGTPHPCTQGHWHRLRTCA

SEQ ID NO: 3050 - protein, 21 aa, Homo Sapiens
LCAGTPHPCTQGHWHRLRTCA

SEQ ID NO: 3051 - protein, 20 aa, Homo Sapiens
  misc_feature (1)..(1): Xaa can be any naturally occurring amino acid
XAGTPHPCTQGHWHRLRTCA

SEQ ID NO: 3052 - protein, 19 aa, Homo Sapiens
AGTPHPCTQGHWHRLRTCA

SEQ ID NO: 3053 - protein, 18 aa, Homo Sapiens
GTPHPCTQGHWHRLRTCA

SEQ ID NO: 3054 - protein, 18 aa, Homo Sapiens
  misc_feature (1)..(1): Xaa can be any naturally occurring amino acid
XTPHPCTQGHWHRLRTCA

SEQ ID NO: 3055 - protein, 17 aa, Homo Sapiens
  misc_feature (1)..(1): Xaa can be any naturally occurring amino acid
XPHPCTQGHWHRLRTCA

SEQ ID NO: 3056 - protein, 16 aa, Homo Sapiens
  misc_feature (1)..(1): Xaa can be any naturally occurring amino acid
XHPCTQGHWHRLRTCA

SEQ ID NO: 3057 - protein, 13 aa, Homo Sapiens
CTQGHWHRLRTCA

SEQ ID NO: 3058 - protein, 13 aa, Homo Sapiens
  misc_feature (1)..(1): Xaa can be any naturally occurring amino acid
XTQGHWHRLRTCA

SEQ ID NO: 3059 - protein, 12 aa, Homo Sapiens
  misc_feature (1)..(1): Xaa can be any naturally occurring amino acid
XQGHWHRLRTCA

SEQ ID NO: 3060 - protein, 10 aa, Homo Sapiens
  misc_feature (1)..(1): Xaa can be any naturally occurring amino acid
XHWHRLRTCA

SEQ ID NO: 3061 - protein, 9 aa, Homo Sapiens
HWHRLRTCA

SEQ ID NO: 3062 - protein, 8 aa, Homo Sapiens
  misc_feature (1)..(1): Xaa can be any naturally occurring amino acid
XHRLRTCA

SEQ ID NO: 3063 - protein, 7 aa, Homo Sapiens
HRLRTCA

SEQ ID NO: 3064 - protein, 7 aa, Homo Sapiens
  misc_feature (1)..(1): Xaa can be any naturally occurring amino acid
XRLRTCA

SEQ ID NO: 3065 - protein, 6 aa, Homo Sapiens
  misc_feature (1)..(1): Xaa can be any naturally occurring amino acid
XLRTCA

SEQ ID NO: 3066 - protein, 4 aa, Homo Sapiens
  misc_feature (1)..(1): Xaa can be any naturally occurring amino acid
XTCA

SEQ ID NO: 3067 - protein, 4 aa, Homo Sapiens
  misc_feature (1)..(1): Xaa can be any naturally occurring amino acid
XTCA

SEQ ID NO: 3068 - protein, 3 aa, Homo Sapiens
  misc_feature (1)..(1): Xaa can be any naturally occurring amino acid
XCA

SEQ ID NO: 3069 - protein, 2 aa, Homo Sapiens
  misc_feature (1)..(1): Xaa can be any naturally occurring amino acid
XA

SEQ ID NO: 3070 - protein, 10 aa, Homo Sapiens
  misc_feature (1)..(1): Xaa can be any naturally occurring amino acid
XEAAHDGWYR

SEQ ID NO: 3071 - protein, 10 aa, Homo Sapiens
  misc_feature (1)..(1): Xaa can be any naturally occurring amino acid
XEAAHDGWYR

SEQ ID NO: 3072 - protein, 9 aa, Homo Sapiens
  misc_feature (1)..(1): Xaa can be any naturally occurring amino acid
XAAHDGWYR

SEQ ID NO: 3073 - protein, 6 aa, Homo Sapiens
  misc_feature (1)..(1): Xaa can be any naturally occurring amino acid
XDGWYR

SEQ ID NO: 3074 - protein, 1 aa, Homo Sapiens
  misc_feature (1)..(1): Xaa can be any naturally occurring amino acid
X

SEQ ID NO: 3075 - protein, 20 aa, Homo Sapiens
  misc_feature (1)..(1): Xaa can be any naturally occurring amino acid
XLHLSPGLHCHPGQLRQGHL

SEQ ID NO: 3076 - protein, 16 aa, Homo Sapiens
  misc_feature (1)..(1): Xaa can be any naturally occurring amino acid
XPGLHCHPGQLRQGHL

SEQ ID NO: 3077 - protein, 11 aa, Homo Sapiens
  misc_feature (1)..(1): Xaa can be any naturally occurring amino acid
XHPGQLRQGHL

SEQ ID NO: 3078 - protein, 7 aa, Homo Sapiens
QLRQGHL

SEQ ID NO: 3079 - protein, 7 aa, Homo Sapiens
  misc_feature (1)..(1): Xaa can be any naturally occurring amino acid
XLRQGHL

SEQ ID NO: 3080 - protein, 6 aa, Homo Sapiens
  misc_feature (1)..(1): Xaa can be any naturally occurring amino acid
XRQGHL

SEQ ID NO: 3081 - protein, 3 aa, Homo Sapiens
  misc_feature (1)..(1): Xaa can be any naturally occurring amino acid
XHL

SEQ ID NO: 3082 - protein, 40 aa, Homo Sapiens
  misc_feature (1)..(1): Xaa can be any naturally occurring amino acid
XDGEPRWLPRRFRQWHPGPGSRPWTGPGPRPRSSRRQGRG

SEQ ID NO: 3083 - protein, 1 aa, Homo Sapiens
  misc_feature (1)..(1): Xaa can be any naturally occurring amino acid
X

SEQ ID NO: 3084 - protein, 39 aa, Homo Sapiens
DGEPRWLPRRFRQWHPGPGSRPWTGPGPRPRSSRRQGRG

SEQ ID NO: 3085 - protein, 14 aa, Homo Sapiens
  misc_feature (1)..(1): Xaa can be any naturally occurring amino acid
XGDCIHQVSLSGVH

SEQ ID NO: 3086 - protein, 13 aa, Homo Sapiens
  misc_feature (1)..(1): Xaa can be any naturally occurring amino acid
XDCIHQVSLSGVH

SEQ ID NO: 3087 - protein, 11 aa, Homo Sapiens
  misc_feature (1)..(1): Xaa can be any naturally occurring amino acid
XIHQVSLSGVH

SEQ ID NO: 3088 - protein, 8 aa, Homo Sapiens
  misc_feature (1)..(1): Xaa can be any naturally occurring amino acid
XVSLSGVH

SEQ ID NO: 3089 - protein, 5 aa, Homo Sapiens
  misc_feature (1)..(1): Xaa can be any naturally occurring amino acid
XSGVH

SEQ ID NO: 3090 - protein, 34 aa, Homo Sapiens
  misc_feature (1)..(1): Xaa can be any naturally occurring amino acid
XPPRQDPHQSLRAADSGSSCGYNIGFLYKKNKVN

SEQ ID NO: 3091 - protein, 36 aa, Homo Sapiens
  misc_feature (1)..(1): Xaa can be any naturally occurring amino acid
XRWLPRRFRQWHPGPGSRPWTGPGPRPRSSRRQGRG

SEQ ID NO: 3092 - protein, 35 aa, Homo Sapiens
  misc_feature (1)..(1): Xaa can be any naturally occurring amino acid
XWLPRRFRQWHPGPGSRPWTGPGPRPRSSRRQGRG

SEQ ID NO: 3093 - protein, 32 aa, Homo Sapiens
  misc_feature (1)..(1): Xaa can be any naturally occurring amino acid
XRRFRQWHPGPGSRPWTGPGPRPRSSRRQGRG

SEQ ID NO: 3094 - protein, 1 aa, Homo Sapiens
  misc_feature (1)..(1): Xaa can be any naturally occurring amino acid
X

SEQ ID NO: 3095 - protein, 3 aa, Homo Sapiens
  misc_feature (1)..(1): Xaa can be any naturally occurring amino acid
XCY

SEQ ID NO: 3096 - protein, 67 aa, Homo Sapiens
  misc_feature (1)..(1): Xaa can be any naturally occurring amino acid
XCQGRAFGTFSFNLCWALLFQLSRCGHLQSCCHAVEALTFLTSYFEELMYASLPLLCHAIKLTIRKK

SEQ ID NO: 3097 - protein, 54 aa, Homo Sapiens
  misc_feature (1)..(1): Xaa can be any naturally occurring amino acid
XCWALLFQLSRCGHLQSCCHAVEALTFLTSYFEELMYASLPLLCHAIKLTIRKK

SEQ ID NO: 3098 - protein, 7 aa, Homo Sapiens
  misc_feature (1)..(1): Xaa can be any naturally occurring amino acid
XGSSPSR

SEQ ID NO: 3099 - protein, 3 aa, Homo Sapiens
  misc_feature (1)..(1): Xaa can be any naturally occurring amino acid
XVC

SEQ ID NO: 3100 - protein, 1 aa, Homo Sapiens
  misc_feature (1)..(1): Xaa can be any naturally occurring amino acid
X

SEQ ID NO: 3101 - protein, 3 aa, Homo Sapiens
  misc_feature (1)..(1): Xaa can be any naturally occurring amino acid
XGN

SEQ ID NO: 3102 - protein, 2 aa, Homo Sapiens
  misc_feature (1)..(1): Xaa can be any naturally occurring amino acid
XW

SEQ ID NO: 3103 - protein, 2 aa, Homo Sapiens
  misc_feature (1)..(1): Xaa can be any naturally occurring amino acid
XL

SEQ ID NO: 3104 - protein, 40 aa, Homo Sapiens
  misc_feature (1)..(1): Xaa can be any naturally occurring amino acid
XGKMLTNVAIILDLSPVIITGFCLSSTQHQDLRQMGLMSS

SEQ ID NO: 3105 - protein, 38 aa, Homo Sapiens
  misc_feature (1)..(1): Xaa can be any naturally occurring amino acid
XMLTNVAIILDLSPVIITGFCLSSTQHQDLRQMGLMSS

SEQ ID NO: 3106 - protein, 5 aa, Homo Sapiens
  misc_feature (1)..(1): Xaa can be any naturally occurring amino acid
XRMWT

SEQ ID NO: 3107 - protein, 99 aa, Homo Sapiens
CTSRAKTSNDVQRKYEASTATRRTNIQQLILVDLKLVLNQQPSTHVNVLIKYHNAKYTLSKRIPAGKHDLDICKNIFNICTPIMFSGNRRKNAAQFFFS

SEQ ID NO: 3108 - protein, 41 aa, Homo Sapiens
  misc_feature (1)..(1): Xaa can be any naturally occurring amino acid
XRRGGARQPGRGHHAPPGEIAGGDASERGSRKHPAIFQTGC

SEQ ID NO: 3109 - protein, 31 aa, Homo Sapiens
  misc_feature (1)..(1): Xaa can be any naturally occurring amino acid
XGHHAPPGEIAGGDASERGSRKHPAIFQTGC

SEQ ID NO: 3110 - protein, 26 aa, Homo Sapiens
  misc_feature (1)..(1): Xaa can be any naturally occurring amino acid
XPGEIAGGDASERGSRKHPAIFQTGC

SEQ ID NO: 3111 - protein, 25 aa, Homo Sapiens
  misc_feature (1)..(1): Xaa can be any naturally occurring amino acid
XGEIAGGDASERGSRKHPAIFQTGC

SEQ ID NO: 3112 - protein, 24 aa, Homo Sapiens
  misc_feature (1)..(1): Xaa can be any naturally occurring amino acid
XEIAGGDASERGSRKHPAIFQTGC

SEQ ID NO: 3113 - protein, 54 aa, Homo Sapiens
  misc_feature (1)..(1): Xaa can be any naturally occurring amino acid
XCQHFDQPQQCTETGYCLRLPEKDQKGTCISTEVSLIWPPGDGDFGPIEDTCSV

SEQ ID NO: 3114 - protein, 50 aa, Homo Sapiens
  misc_feature (1)..(1): Xaa can be any naturally occurring amino acid
XDQPQQCTETGYCLRLPEKDQKGTCISTEVSLIWPPGDGDFGPIEDTCSV

SEQ ID NO: 3115 - protein, 5 aa, Homo Sapiens
  misc_feature (1)..(1): Xaa can be any naturally occurring amino acid
XEERN

SEQ ID NO: 3116 - protein, 1 aa, Homo Sapiens
L

SEQ ID NO: 3117 - protein, 7 aa, Homo Sapiens
  misc_feature (1)..(1): Xaa can be any naturally occurring amino acid
XKHQERG

SEQ ID NO: 3118 - protein, 80 aa, Homo Sapiens
  misc_feature (1)..(1): Xaa can be any naturally occurring amino acid
XTGGPVFWAGCDQAGSGPSPHVRAAEAVFNILPAPHSYSFLAPFSPQPLPHLPPCTSSHETLVPGSFVTLGQDKPSRNSR

SEQ ID NO: 3119 - protein, 1 aa, Homo Sapiens
C

SEQ ID NO: 3120 - protein, 15 aa, Homo Sapiens
  misc_feature (1)..(1): Xaa can be any naturally occurring amino acid
XGHACDSSCGVCFWS

SEQ ID NO: 3121 - protein, 61 aa, Homo Sapiens
RLCGHSTHHESTKAAPGDYWWAGTYPVPARTQWNPAYWTCQSHQFQLWLCQGQQWHLFSAF

SEQ ID NO: 3122 - protein, 48 aa, Homo Sapiens
  misc_feature (1)..(1): Xaa can be any naturally occurring amino acid
XPHCWAPGQEQCPRHLQRLPRLLQRLLLQLSSAEGGARLPEVFPDRQL

SEQ ID NO: 3123 - protein, 10 aa, Homo Sapiens
  misc_feature (1)..(1): Xaa can be any naturally occurring amino acid
XWFLFCLFGC

SEQ ID NO: 3124 - protein, 19 aa, Homo Sapiens
  misc_feature (1)..(1): Xaa can be any naturally occurring amino acid
XDLCQLQGRHQEEADRDQA

SEQ ID NO: 3125 - protein, 8 aa, Homo Sapiens
  misc_feature (1)..(1): Xaa can be any naturally occurring amino acid
XRGSQAGG

SEQ ID NO: 3126 - protein, 37 aa, Homo Sapiens
WKHQCCQDYCRYHPNMFGTQVHDEDAFGPNGRHCDDQ

SEQ ID NO: 3127 - protein, 7 aa, Homo Sapiens
  misc_feature (1)..(1): Xaa can be any naturally occurring amino acid
XWPHGVR

SEQ ID NO: 3128 - protein, 31 aa, Homo Sapiens
  misc_feature (1)..(1): Xaa can be any naturally occurring amino acid
XWKAPGHCGQGSHWPSYHVHPHQAAEQGACD

SEQ ID NO: 3129 - protein, 29 aa, Homo Sapiens
  misc_feature (1)..(1): Xaa can be any naturally occurring amino acid
XGPAQGQVQVSWPPEDPHLKEVGLHQVQC

SEQ ID NO: 3130 - protein, 23 aa, Homo Sapiens
  misc_feature (1)..(1): Xaa can be any naturally occurring amino acid
XVQVSWPPEDPHLKEVGLHQVQC

SEQ ID NO: 3131 - protein, 2 aa, Homo Sapiens
  misc_feature (1)..(1): Xaa can be any naturally occurring amino acid
XC

SEQ ID NO: 3132 - protein, 5 aa, Homo Sapiens
  misc_feature (1)..(1): Xaa can be any naturally occurring amino acid
XRHGG

SEQ ID NO: 3133 - protein, 4 aa, Homo Sapiens
  misc_feature (1)..(1): Xaa can be any naturally occurring amino acid
XHGG

SEQ ID NO: 3134 - protein, 3 aa, Homo Sapiens
  misc_feature (1)..(1): Xaa can be any naturally occurring amino acid
XGG

SEQ ID NO: 3135 - protein, 37 aa, Homo Sapiens
  misc_feature (1)..(1): Xaa can be any naturally occurring amino acid
XAAHPRWLWGQVHPQSWPSGQVAGPALMRASNVLPPS

SEQ ID NO: 3136 - protein, 27 aa, Homo Sapiens
  misc_feature (1)..(1): Xaa can be any naturally occurring amino acid
XVHPQSWPSGQVAGPALMRASNVLPPS

SEQ ID NO: 3137 - protein, 25 aa, Homo Sapiens
  misc_feature (1)..(1): Xaa can be any naturally occurring amino acid
XPQSWPSGQVAGPALMRASNVLPPS

SEQ ID NO: 3138 - protein, 17 aa, Homo Sapiens
  misc_feature (1)..(1): Xaa can be any naturally occurring amino acid
XVAGPALMRASNVLPPS

SEQ ID NO: 3139 - protein, 15 aa, Homo Sapiens
  misc_feature (1)..(1): Xaa can be any naturally occurring amino acid
XHPLPSGHICPCHLC

SEQ ID NO: 3140 - protein, 12 aa, Homo Sapiens
  misc_feature (1)..(1): Xaa can be any naturally occurring amino acid
XPSGHICPCHLC

SEQ ID NO: 3141 - protein, 4 aa, Homo Sapiens
CHLC

SEQ ID NO: 3142 - protein, 42 aa, Homo Sapiens
  misc_feature (1)..(1): Xaa can be any naturally occurring amino acid
XGLVPHWLQGWHQLPASHCGAWWRPGQGTESCVHAEQHHSHC

SEQ ID NO: 3143 - protein, 35 aa, Homo Sapiens
LQGWHQLPASHCGAWWRPGQGTESCVHAEQHHSHC

SEQ ID NO: 3144 - protein, 1 aa, Homo Sapiens
  misc_feature (1)..(1): Xaa can be any naturally occurring amino acid
X

SEQ ID NO: 3145 - protein, 1 aa, Homo Sapiens
  misc_feature (1)..(1): Xaa can be any naturally occurring amino acid
X

SEQ ID NO: 3146 - protein, 16 aa, Homo Sapiens
  misc_feature (1)..(1): Xaa can be any naturally occurring amino acid
XARAPGCVCRLGTHSH

SEQ ID NO: 3147 - protein, 15 aa, Homo Sapiens
  misc_feature (1)..(1): Xaa can be any naturally occurring amino acid
XRAPGCVCRLGTHSH

SEQ ID NO: 3148 - protein, 9 aa, Homo Sapiens
  misc_feature (1)..(1): Xaa can be any naturally occurring amino acid
XCRLGTHSH

SEQ ID NO: 3149 - protein, 4 aa, Homo Sapiens
  misc_feature (1)..(1): Xaa can be any naturally occurring amino acid
XLPP

SEQ ID NO: 3150 - protein, 11 aa, Homo Sapiens
  misc_feature (1)..(1): Xaa can be any naturally occurring amino acid
XAHHRQGRCCQ

SEQ ID NO: 3151 - protein, 5 aa, Homo Sapiens
  misc_feature (1)..(1): Xaa can be any naturally occurring amino acid
XRCCQ

SEQ ID NO: 3152 - protein, 11 aa, Homo Sapiens
  misc_feature (1)..(1): Xaa can be any naturally occurring amino acid
XRALHHWQGDH

SEQ ID NO: 3153 - protein, 5 aa, Homo Sapiens
  misc_feature (1)..(1): Xaa can be any naturally occurring amino acid
XQGDH

SEQ ID NO: 3154 - protein, 4 aa, Homo Sapiens
QGDH

SEQ ID NO: 3155 - protein, 4 aa, Homo Sapiens
  misc_feature (1)..(1): Xaa can be any naturally occurring amino acid
XGDH

SEQ ID NO: 3156 - protein, 3 aa, Homo Sapiens
  misc_feature (1)..(1): Xaa can be any naturally occurring amino acid
XDH

SEQ ID NO: 3157 - protein, 3 aa, Homo Sapiens
  misc_feature (1)..(1): Xaa can be any naturally occurring amino acid
XDH

SEQ ID NO: 3158 - protein, 11 aa, Homo Sapiens
  misc_feature (1)..(1): Xaa can be any naturally occurring amino acid
XPCVGPNSQAG

SEQ ID NO: 3159 - protein, 8 aa, Homo Sapiens
  misc_feature (1)..(1): Xaa can be any naturally occurring amino acid
XGPNSQAG

SEQ ID NO: 3160 - protein, 3 aa, Homo Sapiens
  misc_feature (1)..(1): Xaa can be any naturally occurring amino acid
XAG

SEQ ID NO: 3161 - protein, 31 aa, Homo Sapiens
  misc_feature (1)..(1): Xaa can be any naturally occurring amino acid
XHRSSGLLGFPQLWWGNWFWVHLPAHGTSLS

SEQ ID NO: 3162 - protein, 28 aa, Homo Sapiens
SSGLLGFPQLWWGNWFWVHLPAHGTSLS

SEQ ID NO: 3163 - protein, 26 aa, Homo Sapiens
  misc_feature (1)..(1): Xaa can be any naturally occurring amino acid
XLLGFPQLWWGNWFWVHLPAHGTSLS

SEQ ID NO: 3164 - protein, 25 aa, Homo Sapiens
LLGFPQLWWGNWFWVHLPAHGTSLS

SEQ ID NO: 3165 - protein, 24 aa, Homo Sapiens
  misc_feature (1)..(1): Xaa can be any naturally occurring amino acid
XGFPQLWWGNWFWVHLPAHGTSLS

SEQ ID NO: 3166 - protein, 19 aa, Homo Sapiens
  misc_feature (1)..(1): Xaa can be any naturally occurring amino acid
XWWGNWFWVHLPAHGTSLS

SEQ ID NO: 3167 - protein, 11 aa, Homo Sapiens
  misc_feature (1)..(1): Xaa can be any naturally occurring amino acid
XHLPAHGTSLS

SEQ ID NO: 3168 - protein, 9 aa, Homo Sapiens
  misc_feature (1)..(1): Xaa can be any naturally occurring amino acid
XPAHGTSLS

SEQ ID NO: 3169 - protein, 20 aa, Homo Sapiens
  misc_feature (1)..(1): Xaa can be any naturally occurring amino acid
XEVQAGVLHLPSTPGFHSCS

SEQ ID NO: 3170 - protein, 3 aa, Homo Sapiens
  misc_feature (1)..(1): Xaa can be any naturally occurring amino acid
XCS

SEQ ID NO: 3171 - protein, 1 aa, Homo Sapiens
  misc_feature (1)..(1): Xaa can be any naturally occurring amino acid
X

SEQ ID NO: 3172 - protein, 4 aa, Homo Sapiens
  misc_feature (1)..(1): Xaa can be any naturally occurring amino acid
XGAL

SEQ ID NO: 3173 - protein, 3 aa, Homo Sapiens
  misc_feature (1)..(1): Xaa can be any naturally occurring amino acid
XLS

SEQ ID NO: 3174 - protein, 1 aa, Homo Sapiens
  misc_feature (1)..(1): Xaa can be any naturally occurring amino acid
X

SEQ ID NO: 3175 - protein, 9 aa, Homo Sapiens
  misc_feature (1)..(1): Xaa can be any naturally occurring amino acid
XLHHCFPEI

SEQ ID NO: 3176 - protein, 5 aa, Homo Sapiens
  misc_feature (1)..(1): Xaa can be any naturally occurring amino acid
XFPEI

SEQ ID NO: 3177 - protein, 4 aa, Homo Sapiens
  misc_feature (1)..(1): Xaa can be any naturally occurring amino acid
XPEI

SEQ ID NO: 3178 - protein, 3 aa, Homo Sapiens
  misc_feature (1)..(1): Xaa can be any naturally occurring amino acid
XEI

SEQ ID NO: 3179 - protein, 4 aa, Homo Sapiens
SPEC

SEQ ID NO: 3180 - protein, 3 aa, Homo Sapiens
  misc_feature (1)..(1): Xaa can be any naturally occurring amino acid
XGG

SEQ ID NO: 3181 - protein, 9 aa, Homo Sapiens
CSAGSLPLC

SEQ ID NO: 3182 - protein, 14 aa, Homo Sapiens
  misc_feature (1)..(1): Xaa can be any naturally occurring amino acid
XGPYQGCAECGLLL

SEQ ID NO: 3183 - protein, 26 aa, Homo Sapiens
  misc_feature (1)..(1): Xaa can be any naturally occurring amino acid
XLLAQQQQPYHRLLWLGQAGQGMEPG

SEQ ID NO: 3184 - protein, 22 aa, Homo Sapiens
  misc_feature (1)..(1): Xaa can be any naturally occurring amino acid
XQQQPYHRLLWLGQAGQGMEPG

SEQ ID NO: 3185 - protein, 63 aa, Homo Sapiens
  misc_feature (1)..(1): Xaa can be any naturally occurring amino acid
XLQAEDQPHWPHRLSEHGDCLSRWIPLCFWRQGWPGHVMGSQRRQTPLHARWWGHHQRPVLQP

SEQ ID NO: 3186 - protein, 59 aa, Homo Sapiens
  misc_feature (1)..(1): Xaa can be any naturally occurring amino acid
XDQPHWPHRLSEHGDCLSRWIPLCFWRQGWPGHVMGSQRRQTPLHARWWGHHQRPVLQP

SEQ ID NO: 3187 - protein, 50 aa, Homo Sapiens
LSEHGDCLSRWIPLCFWRQGWPGHVMGSQRRQTPLHARWWGHHQRPVLQP

SEQ ID NO: 3188 - protein, 46 aa, Homo Sapiens
GDCLSRWIPLCFWRQGWPGHVMGSQRRQTPLHARWWGHHQRPVLQP

SEQ ID NO: 3189 - protein, 41 aa, Homo Sapiens
RWIPLCFWRQGWPGHVMGSQRRQTPLHARWWGHHQRPVLQP

SEQ ID NO: 3190 - skipped

SEQ ID NO: 3191 - protein, 14 aa, Homo Sapiens
QHQDLGFRGKDHCR

SEQ ID NO: 3192 - protein, 6 aa, Homo Sapiens
HPPACE

SEQ ID NO: 3193 - protein, 10 aa, Homo Sapiens
  misc_feature (1)..(1): Xaa can be any naturally occurring amino acid
XFECRARVES

SEQ ID NO: 3194 - skipped

SEQ ID NO: 3195 - protein, 5 aa, Homo Sapiens
  misc_feature (1)..(1): Xaa can be any naturally occurring amino acid
XDYYH

SEQ ID NO: 3196 - skipped

SEQ ID NO: 3197 - protein, 14 aa, Homo Sapiens
  misc_feature (1)..(1): Xaa can be any naturally occurring amino acid
XGFHLCVSYRNCCF

SEQ ID NO: 3198 - protein, 10 aa, Homo Sapiens
  misc_feature (1)..(1): Xaa can be any naturally occurring amino acid
XCVSYRNCCF

SEQ ID NO: 3199 - protein, 24 aa, Homo Sapiens
CLDKYTKEEWWFGPHEHRTLVRLN

SEQ ID NO: 3200 - protein, 13 aa, Homo Sapiens
  misc_feature (1)..(1): Xaa can be any naturally occurring amino acid
XGPHEHRTLVRLN

SEQ ID NO: 3201 - protein, 7 aa, Homo Sapiens
  misc_feature (1)..(1): Xaa can be any naturally occurring amino acid
XKRSLHN

SEQ ID NO: 3202 - protein, 6 aa, Homo Sapiens
  misc_feature (1)..(1): Xaa can be any naturally occurring amino acid
XRSLHN

SEQ ID NO: 3203 - protein, 5 aa, Homo Sapiens
  misc_feature (1)..(1): Xaa can be any naturally occurring amino acid
XDDRR

SEQ ID NO: 3204 - protein, 38 aa, Homo Sapiens
  misc_feature (1)..(1): Xaa can be any naturally occurring amino acid
XPGCQLLGVIAQEKLAECPGLIYQEHHGQAPAPILRHI

SEQ ID NO: 3205 - protein, 25 aa, Homo Sapiens
  misc_feature (1)..(1): Xaa can be any naturally occurring amino acid
XLAECPGLIYQEHHGQAPAPILRHI

SEQ ID NO: 3206 - protein, 20 aa, Homo Sapiens
  misc_feature (1)..(1): Xaa can be any naturally occurring amino acid
XGLIYQEHHGQAPAPILRHI

SEQ ID NO: 3207 - protein, 9 aa, Homo Sapiens
  misc_feature (1)..(1): Xaa can be any naturally occurring amino acid
XDFPSGVDL

SEQ ID NO: 3208 - protein, 12 aa, Homo Sapiens
LYDGQKAPGDQP

SEQ ID NO: 3209 - protein, 23 aa, Homo Sapiens
  misc_feature (1)..(1): Xaa can be any naturally occurring amino acid
XEAFSVHRLSHHPLFGEGTREGN

SEQ ID NO: 3210 - protein, 32 aa, Homo Sapiens
  misc_feature (1)..(1): Xaa can be any naturally occurring amino acid
XGPQPHLLADRARYAAPQNQARPGRSGPSQGV

SEQ ID NO: 3211 - protein, 31 aa, Homo Sapiens
  misc_feature (1)..(1): Xaa can be any naturally occurring amino acid
XEERESQDPLPEEETAHEATETGREERGEEN

SEQ ID NO: 3212 - protein, 29 aa, Homo Sapiens
  misc_feature (1)..(1): Xaa can be any naturally occurring amino acid
XRESQDPLPEEETAHEATETGREERGEEN

SEQ ID NO: 3213 - protein, 3 aa, Homo Sapiens
  misc_feature (1)..(1): Xaa can be any naturally occurring amino acid
XEN

SEQ ID NO: 3214 - protein, 53 aa, Homo Sapiens
  misc_feature (1)..(1): Xaa can be any naturally occurring amino acid
XIHRGPQDPRTPGLSPIKTVNSSCVACPSSIVALECTGPRGSSSPGATGSPGT

SEQ ID NO: 3215 - protein, 14 aa, Homo Sapiens
WYGLFHVSGILGKT

SEQ ID NO: 3216 - protein, 3 aa, Homo Sapiens
  misc_feature (1)..(1): Xaa can be any naturally occurring amino acid
XKT

SEQ ID NO: 3217 - protein, 8 aa, Homo Sapiens
  misc_feature (1)..(1): Xaa can be any naturally occurring amino acid
XDCCVPCL

SEQ ID NO: 3218 - protein, 20 aa, Homo Sapiens
CRDCKSGRTAARMGRSDADG

SEQ ID NO: 3219 - protein, 1 aa, Homo Sapiens
  misc_feature (1)..(1): Xaa can be any naturally occurring amino acid
X

SEQ ID NO: 3220 - protein, 2 aa, Homo Sapiens
  misc_feature (1)..(1): Xaa can be any naturally occurring amino acid
XA

SEQ ID NO: 3221 - protein, 1 aa, Homo Sapiens
  misc_feature (1)..(1): Xaa can be any naturally occurring amino acid
X

SEQ ID NO: 3222 - protein, 2 aa, Homo Sapiens
  misc_feature (1)..(1): Xaa can be any naturally occurring amino acid
XL

SEQ ID NO: 3223 - protein, 99 aa, Homo Sapiens
  misc_feature (1)..(1): Xaa can be any naturally occurring amino acid
XVWAALPLQNAWLLQPGRASPPALPVRRLLPGHQGAGEHRTEQEEYVFPCARVPGHHILLCWVCIFDDASLPGCHPGLRQHPPLHPEDQEHVPEDHVQV

SEQ ID NO: 3224 - protein, 6 aa, Homo Sapiens
  misc_feature (1)..(1): Xaa can be any naturally occurring amino acid
XWHASS

SEQ ID NO: 3225 - protein, 31 aa, Homo Sapiens
  misc_feature (1)..(1): Xaa can be any naturally occurring amino acid
XGRENGTAVTRGCGHGRCSLKISVTISFMYI

SEQ ID NO: 3226 - protein, 17 aa, Homo Sapiens
  misc_feature (1)..(1): Xaa can be any naturally occurring amino acid
XYGQAESLASFKAKEDV

SEQ ID NO: 3227 - protein, 17 aa, Homo Sapiens
  misc_feature (1)..(1): Xaa can be any naturally occurring amino acid
XWAEDRSGPWILLHSRQ

SEQ ID NO: 3228 - protein, 4 aa, Homo Sapiens
  misc_feature (1)..(1): Xaa can be any naturally occurring amino acid
XCRH

SEQ ID NO: 3229 - protein, 1 aa, Homo Sapiens
  misc_feature (1)..(1): Xaa can be any naturally occurring amino acid
X

SEQ ID NO: 3230 - protein, 4 aa, Homo Sapiens
  misc_feature (1)..(1): Xaa can be any naturally occurring amino acid
XRLL

SEQ ID NO: 3231 - protein, 22 aa, Homo Sapiens
  misc_feature (1)..(1): Xaa can be any naturally occurring amino acid
XVHGKCWTQHKWFPVFHLHCQD

SEQ ID NO: 3232 - protein, 27 aa, Homo Sapiens
  misc_feature (1)..(1): Xaa can be any naturally occurring amino acid
XRRHEYCGGHGALWVQEWQDQQEDHHC

SEQ ID NO: 3233 - protein, 2 aa, Homo Sapiens
  misc_feature (1)..(1): Xaa can be any naturally occurring amino acid
XC

SEQ ID NO: 3234 - protein, 3 aa, Homo Sapiens
  misc_feature (1)..(1): Xaa can be any naturally occurring amino acid
XRH

SEQ ID NO: 3235 - protein, 2 aa, Homo Sapiens
  misc_feature (1)..(1): Xaa can be any naturally occurring amino acid
XN

SEQ ID NO: 3236 - protein, 10 aa, Homo Sapiens
  misc_feature (1)..(1): Xaa can be any naturally occurring amino acid
XEKGLCLCNL

SEQ ID NO: 3237 - protein, 8 aa, Homo Sapiens
  misc_feature (1)..(1): Xaa can be any naturally occurring amino acid
XGLCLCNL

SEQ ID NO: 3238 - protein, 4 aa, Homo Sapiens
  misc_feature (1)..(1): Xaa can be any naturally occurring amino acid
XCNL

SEQ ID NO: 3239 - protein, 3 aa, Homo Sapiens
  misc_feature (1)..(1): Xaa can be any naturally occurring amino acid
XRP

SEQ ID NO: 3240 - protein, 1 aa, Homo Sapiens
  misc_feature (1)..(1): Xaa can be any naturally occurring amino acid
X

SEQ ID NO: 3241 - protein, 15 aa, Homo Sapiens
  misc_feature (1)..(1): Xaa can be any naturally occurring amino acid
XDCHSEIPYCEWPQL

SEQ ID NO: 3242 - protein, 5 aa, Homo Sapiens
  misc_feature (1)..(1): Xaa can be any naturally occurring amino acid
XARDG

SEQ ID NO: 3243 - protein, 26 aa, Homo Sapiens
  misc_feature (1)..(1): Xaa can be any naturally occurring amino acid
XCFIQPKRSKWFWKLWWWSWRWFRWE

SEQ ID NO: 3244 - protein, 17 aa, Homo Sapiens
  misc_feature (1)..(1): Xaa can be any naturally occurring amino acid
XWFWKLWWWSWRWFRWE

SEQ ID NO: 3245 - protein, 11 aa, Homo Sapiens
  misc_feature (1)..(1): Xaa can be any naturally occurring amino acid
XWWSWRWFRWE

SEQ ID NO: 3246 - protein, 46 aa, Homo Sapiens
  misc_feature (1)..(1): Xaa can be any naturally occurring amino acid
XLGSHGRGRLSEHYANRNRYDCRKRPGRFLYQRFDSWREEMLSDQR

SEQ ID NO: 3247 - protein, 3 aa, Homo Sapiens
  misc_feature (1)..(1): Xaa can be any naturally occurring amino acid
XCT

SEQ ID NO: 3248 - protein, 14 aa, Homo Sapiens
  misc_feature (1)..(1): Xaa can be any naturally occurring amino acid
XVYSWRHPLGWRRF

SEQ ID NO: 3249 - protein, 9 aa, Homo Sapiens
RHPLGWRRF

SEQ ID NO: 3250 - protein, 6 aa, Homo Sapiens
  misc_feature (1)..(1): Xaa can be any naturally occurring amino acid
XGWRRF

SEQ ID NO: 3251 - protein, 4 aa, Homo Sapiens
WRRF

SEQ ID NO: 3252 - protein, 3 aa, Homo Sapiens
RRF

SEQ ID NO: 3253 - protein, 8 aa, Homo Sapiens
  misc_feature (1)..(1): Xaa can be any naturally occurring amino acid
XNGQPFYC

SEQ ID NO: 3254 - protein, 2 aa, Homo Sapiens
  misc_feature (1)..(1): Xaa can be any naturally occurring amino acid
XC

SEQ ID NO: 3255 - protein, 25 aa, Homo Sapiens
AGQLHSAVAHPHHPAAGEGGPAGAQ

SEQ ID NO: 3256 - protein, 13 aa, Homo Sapiens
  misc_feature (1)..(1): Xaa can be any naturally occurring amino acid
XQPDRRQVLGGHQ

SEQ ID NO: 3257 - protein, 14 aa, Homo Sapiens
  misc_feature (1)..(1): Xaa can be any naturally occurring amino acid
XQRPAAGPHLCVLQ

SEQ ID NO: 3258 - protein, 20 aa, Homo Sapiens
  misc_feature (1)..(1): Xaa can be any naturally occurring amino acid
XGSRTWDHGLCSLRSFWPDL

SEQ ID NO: 3259 - protein, 13 aa, Homo Sapiens
  misc_feature (1)..(1): Xaa can be any naturally occurring amino acid
XTRQLCIWSVWGR

SEQ ID NO: 3260 - protein, 12 aa, Homo Sapiens
  misc_feature (1)..(1): Xaa can be any naturally occurring amino acid
XRQLCIWSVWGR

SEQ ID NO: 3261 - protein, 7 aa, Homo Sapiens
  misc_feature (1)..(1): Xaa can be any naturally occurring amino acid
XWSVWGR

SEQ ID NO: 3262 - protein, 14 aa, Homo Sapiens
  misc_feature (1)..(1): Xaa can be any naturally occurring amino acid
XGHSPYQQDPRRIP

SEQ ID NO: 3263 - protein, 12 aa, Homo Sapiens
HSPYQQDPRRIP

SEQ ID NO: 3264 - protein, 5 aa, Homo Sapiens
  misc_feature (1)..(1): Xaa can be any naturally occurring amino acid
XRRIP

SEQ ID NO: 3265 - protein, 3 aa, Homo Sapiens
  misc_feature (1)..(1): Xaa can be any naturally occurring amino acid
XIP

SEQ ID NO: 3266 - protein, 10 aa, Homo Sapiens
  misc_feature (1)..(1): Xaa can be any naturally occurring amino acid
XQCGAFTQSV

SEQ ID NO: 3267 - protein, 17 aa, Homo Sapiens
  misc_feature (1)..(1): Xaa can be any naturally occurring amino acid
XRALQCHPLRPSVGREY

SEQ ID NO: 3268 - protein, 10 aa, Homo Sapiens
  misc_feature (1)..(1): Xaa can be any naturally occurring amino acid
XLRPSVGREY

SEQ ID NO: 3269 - protein, 4 aa, Homo Sapiens
  misc_feature (1)..(1): Xaa can be any naturally occurring amino acid
XREY

SEQ ID NO: 3270 - protein, 4 aa, Homo Sapiens
  misc_feature (1)..(1): Xaa can be any naturally occurring amino acid
XGPL

SEQ ID NO: 3271 - protein, 3 aa, Homo Sapiens
  misc_feature (1)..(1): Xaa can be any naturally occurring amino acid
XPL

SEQ ID NO: 3272 - protein, 2 aa, Homo Sapiens
  misc_feature (1)..(1): Xaa can be any naturally occurring amino acid
XL

SEQ ID NO: 3273 - protein, 37 aa, Homo Sapiens
  misc_feature (1)..(1): Xaa can be any naturally occurring amino acid
XPHSEADHTNLRGSEPPCLSHHEWCHHLPPFPWPAQC

SEQ ID NO: 3274 - protein, 27 aa, Homo Sapiens
  misc_feature (1)..(1): Xaa can be any naturally occurring amino acid
XRGSEPPCLSHHEWCHHLPPFPWPAQC

SEQ ID NO: 3275 - protein, 25 aa, Homo Sapiens
  misc_feature (1)..(1): Xaa can be any naturally occurring amino acid
XSEPPCLSHHEWCHHLPPFPWPAQC

SEQ ID NO: 3276 - protein, 23 aa, Homo Sapiens
  misc_feature (1)..(1): Xaa can be any naturally occurring amino acid
XPPCLSHHEWCHHLPPFPWPAQC

SEQ ID NO: 3277 - protein, 21 aa, Homo Sapiens
  misc_feature (1)..(1): Xaa can be any naturally occurring amino acid
XCLSHHEWCHHLPPFPWPAQC

SEQ ID NO: 3278 - protein, 20 aa, Homo Sapiens
  misc_feature (1)..(1): Xaa can be any naturally occurring amino acid
XLSHHEWCHHLPPFPWPAQC

SEQ ID NO: 3279 - protein, 16 aa, Homo Sapiens
  misc_feature (1)..(1): Xaa can be any naturally occurring amino acid
XEWCHHLPPFPWPAQC

SEQ ID NO: 3280 - protein, 13 aa, Homo Sapiens
CHHLPPFPWPAQC

SEQ ID NO: 3281 - protein, 9 aa, Homo Sapiens
  misc_feature (1)..(1): Xaa can be any naturally occurring amino acid
XPFPWPAQC

SEQ ID NO: 3282 - protein, 7 aa, Homo Sapiens
  misc_feature (1)..(1): Xaa can be any naturally occurring amino acid
XPWPAQC

SEQ ID NO: 3283 - protein, 44 aa, Homo Sapiens
  misc_feature (1)..(1): Xaa can be any naturally occurring amino acid
XPTSPFLYAWLCPSHQPWKPAVSSSHSAGTHPAGLRCQEHDGCL

SEQ ID NO: 3284 - protein, 10 aa, Homo Sapiens
  misc_feature (1)..(1): Xaa can be any naturally occurring amino acid
XVPSWLETWQ

SEQ ID NO: 3285 - protein, 3 aa, Homo Sapiens
EAP

SEQ ID NO: 3286 - protein, 12 aa, Homo Sapiens
  misc_feature (1)..(1): Xaa can be any naturally occurring amino acid
XCGSSELLSWNS

SEQ ID NO: 3287 - protein, 17 aa, Homo Sapiens
  misc_feature (1)..(1): Xaa can be any naturally occurring amino acid
XCGDHQECAHSHGKLCF

SEQ ID NO: 3288 - protein, 17 aa, Homo Sapiens
  misc_feature (1)..(1): Xaa can be any naturally occurring amino acid
XCRGGAEEGSHSQNHAG

SEQ ID NO: 3289 - protein, 11 aa, Homo Sapiens
  misc_feature (1)..(1): Xaa can be any naturally occurring amino acid
XEGSHSQNHAG

SEQ ID NO: 3290 - protein, 11 aa, Homo Sapiens
  misc_feature (1)..(1): Xaa can be any naturally occurring amino acid
XEGSHSQNHAG

SEQ ID NO: 3291 - protein, 2 aa, Homo Sapiens
  misc_feature (1)..(1): Xaa can be any naturally occurring amino acid
XV

SEQ ID NO: 3292 - protein, 5 aa, Homo Sapiens
HPGCR

SEQ ID NO: 3293 - protein, 17 aa, Homo Sapiens
  misc_feature (1)..(1): Xaa can be any naturally occurring amino acid
XGRDKWRDYHPRVGWAV

SEQ ID NO: 3294 - protein, 7 aa, Homo Sapiens
  misc_feature (1)..(1): Xaa can be any naturally occurring amino acid
XARGRPG

SEQ ID NO: 3295 - protein, 1 aa, Homo Sapiens
  misc_feature (1)..(1): Xaa can be any naturally occurring amino acid
X

SEQ ID NO: 3296 - protein, 12 aa, Homo Sapiens
LCTPEEQRAAPE

SEQ ID NO: 3297 - protein, 33 aa, Homo Sapiens
  misc_feature (1)..(1): Xaa can be any naturally occurring amino acid
XERSQRERYLGSTKAPACSTQRSTLCENQWEGA

SEQ ID NO: 3298 - protein, 18 aa, Homo Sapiens
  misc_feature (1)..(1): Xaa can be any naturally occurring amino acid
XGERRHCGREAGLGPREA

SEQ ID NO: 3299 - protein, 15 aa, Homo Sapiens
  misc_feature (1)..(1): Xaa can be any naturally occurring amino acid
XRHCGREAGLGPREA

SEQ ID NO: 3300 - protein, 1 aa, Homo Sapiens
  misc_feature (1)..(1): Xaa can be any naturally occurring amino acid
X

SEQ ID NO: 3301 - protein, 13 aa, Homo Sapiens
  misc_feature (1)..(1): Xaa can be any naturally occurring amino acid
XETQTFLSASFYF

SEQ ID NO: 3302 - protein, 2 aa, Homo Sapiens
  misc_feature (1)..(1): Xaa can be any naturally occurring amino acid
XE

SEQ ID NO: 3303 - protein, 26 aa, Homo Sapiens
  misc_feature (1)..(1): Xaa can be any naturally occurring amino acid
XLWDRDPAVACHGRAEPIFGRGDCLL

SEQ ID NO: 3304 - protein, 9 aa, Homo Sapiens
  misc_feature (1)..(1): Xaa can be any naturally occurring amino acid
XYLQLHHEV

SEQ ID NO: 3305 - protein, 7 aa, Homo Sapiens
  misc_feature (1)..(1): Xaa can be any naturally occurring amino acid
XNFWLEW

SEQ ID NO: 3306 - protein, 1 aa, Homo Sapiens
  misc_feature (1)..(1): Xaa can be any naturally occurring amino acid
X

SEQ ID NO: 3307 - protein, 10 aa, Homo Sapiens
  misc_feature (1)..(1): Xaa can be any naturally occurring amino acid
XGEKGGCPCS

SEQ ID NO: 3308 - protein, 43 aa, Homo Sapiens
  misc_feature (1)..(1): Xaa can be any naturally occurring amino acid
XHGLWRRGHPHGAHLRGLRPPPRHPASGPGWPGPDRLPHEDPH

SEQ ID NO: 3309 - protein, 40 aa, Homo Sapiens
  misc_feature (1)..(1): Xaa can be any naturally occurring amino acid
XGEAVLRRPGLRAGDGHRRILLFSGEELRAARWPGHHHWQ

SEQ ID NO: 3310 - protein, 5 aa, Homo Sapiens
MGGHA

SEQ ID NO: 3311 - protein, 5 aa, Homo Sapiens
  misc_feature (1)..(1): Xaa can be any naturally occurring amino acid
XLQRS

SEQ ID NO: 3312 - protein, 6 aa, Homo Sapiens
  misc_feature (1)..(1): Xaa can be any naturally occurring amino acid
XRAGCC

SEQ ID NO: 3313 - protein, 5 aa, Homo Sapiens
  misc_feature (1)..(1): Xaa can be any naturally occurring amino acid
XLSQG

SEQ ID NO: 3314 - protein, 10 aa, Homo Sapiens
  misc_feature (1)..(1): Xaa can be any naturally occurring amino acid
XFQKLPVLYW

SEQ ID NO: 3315 - protein, 1 aa, Homo Sapiens
  misc_feature (1)..(1): Xaa can be any naturally occurring amino acid
X

SEQ ID NO: 3316 - protein, 7 aa, Homo Sapiens
  misc_feature (1)..(1): Xaa can be any naturally occurring amino acid
XGFHSCS

SEQ ID NO: 3317 - protein, 1 aa, Homo Sapiens
  misc_feature (1)..(1): Xaa can be any naturally occurring amino acid
X

SEQ ID NO: 3318 - protein, 54 aa, Homo Sapiens
  misc_feature (1)..(1): Xaa can be any naturally occurring amino acid
XGLQQHEEVLPSHPCHCPHPDAPASSAPEEGPPDGDPGERRHCGREAGLGPREA

SEQ ID NO: 3319 - protein, 14 aa, Homo Sapiens
  misc_feature (1)..(1): Xaa can be any naturally occurring amino acid
XEDDGNHDPRGADK

SEQ ID NO: 3320 - protein, 2 aa, Homo Sapiens
HP

SEQ ID NO: 3321 - protein, 44 aa, Homo Sapiens
  misc_feature (1)..(1): Xaa can be any naturally occurring amino acid
XEGFLCGRRGPEQERHPHPEVPHRARHRHQLGRHGENLAPHLLQ

SEQ ID NO: 3322 - protein, 14 aa, Homo Sapiens
  misc_feature (1)..(1): Xaa can be any naturally occurring amino acid
XRFGQVHHYWPSDL

SEQ ID NO: 3323 - protein, 5 aa, Homo Sapiens
WPSDL

SEQ ID NO: 3324 - protein, 1 aa, Homo Sapiens
C

SEQ ID NO: 3325 - protein, 6 aa, Homo Sapiens
  misc_feature (1)..(1): Xaa can be any naturally occurring amino acid
XQPEEI

SEQ ID NO: 3326 - protein, 4 aa, Homo Sapiens
  misc_feature (1)..(1): Xaa can be any naturally occurring amino acid
XEEI

SEQ ID NO: 3327 - protein, 3 aa, Homo Sapiens
  misc_feature (1)..(1): Xaa can be any naturally occurring amino acid
XEI

SEQ ID NO: 3328 - protein, 4 aa, Homo Sapiens
  misc_feature (1)..(1): Xaa can be any naturally occurring amino acid
XAKC

SEQ ID NO: 3329 - protein, 28 aa, Homo Sapiens
  misc_feature (1)..(1): Xaa can be any naturally occurring amino acid
XGSEANSGAAGCLLEDEDFSGGRTSDIG

SEQ ID NO: 3330 - protein, 18 aa, Homo Sapiens
  misc_feature (1)..(1): Xaa can be any naturally occurring amino acid
XCLLEDEDFSGGRTSDIG

SEQ ID NO: 3331 - protein, 10 aa, Homo Sapiens
  misc_feature (1)..(1): Xaa can be any naturally occurring amino acid
XGGPPVPPHR

SEQ ID NO: 3332 - protein, 6 aa, Homo Sapiens
  misc_feature (1)..(1): Xaa can be any naturally occurring amino acid
XGQGHP

SEQ ID NO: 3333 - protein, 3 aa, Homo Sapiens
  misc_feature (1)..(1): Xaa can be any naturally occurring amino acid
XWM

SEQ ID NO: 3334 - protein, 27 aa, Homo Sapiens
  misc_feature (1)..(1): Xaa can be any naturally occurring amino acid
XPGAVLHGELDTMFVWKCPVFAMPMLS
